(19) United States
(12) Patent Application Publication
(10) Pub. No.: US 2011/0319415 A1
(43) Pub. Date: Dec. 29, 2011

(54) Susceptibility to HSP90-Inhibitors

(75) Inventors: Roman Thomas, Bornheim (DE); Kathrin Maring, Bonn (DE); Thomas Zander, Bonn (DE); Peter Frommolt, Koln (DE); Kwok-kin Wong, Arlington, MA (US)

(73) Assignees: Universit+e,uml a+ee t zu K+e,uml o+ee ln, Kö'ln (DE); Max-Planck-Gesellschaft zur F+e,uml o+ee rderung der Wissens, München (DE)

(21) Appl. No.: 13/059,557

(22) PCT Filed: Aug. 17, 2009
(86) PCT No.: PCT/EP2009/060640

§ 371 Date: Jun. 8, 2011

Related U.S. Application Data
(60) Provisional application No. 61/102,190, filed on Oct. 2, 2008.

(30) Foreign Application Priority Data
Aug. 18, 2008 (EP) 08014656.6

(51) Int. Cl. A61K 31/395; C12Q 1/68; G01N 33/567; A61K 31/5377; A61P 35/00; A61P 35/02; C40B 30/04; C12Q 1/02

(52) U.S. Cl. 514/236.8; 506/9; 435/6.11; 435/29; 514/183; 435/7.23

(57) ABSTRACT

The present invention relates to a method of selecting (a) cell(s), (a) tissue(s) or (a) cell culture(s) with susceptibility to an HSP90 inhibitor. Also a method for determining the responsiveness of a mammalian tumor cell or cancer cell to treatment with an HSP90 inhibitor is described herein. In particular, the present invention provides for an in vitro method for the identification of a responder for or a patient sensitive to an HSP90 inhibitor and uses of an oligo- or polynucleotide capable of detecting (an) activating mutation(s) in the KRAS gene are provided. The present invention also relates to a method of monitoring the efficacy of a treatment of a cancer characterized by the presence of at least one activating mutation in the KRAS gene, and. optionally, in the EGFR gene and/or the BRAF gene. In addition, a method of predicting the efficacy of a cancer treatment is described, in particular in a cancer that is characterized by the presence of at least one activating mutation in the KRAS gene. and. optionally, in the EGFR gene and/or the BRAF gene. Also the use of a (transgenic) non-human animal or a (transgenic) cell having at least one activating mutation in the KRAS gene, and, optionally, in the EGFR gene and/or the BRAF gene for screening and/or validation of a medicament for the treatment of said cancer is described and a kit useful for carrying out the methods described herein is provided.

[0001] The present invention relates to a method of selecting (a) cell(s), (a) tissue(s) or (a) cell culture(s) with susceptibility to an HSP90 inhibitor. Also a method for determining the responsiveness of a mammalian tumor cell or cancer cell to treatment with an HSP90 inhibitor is described herein. In particular, the present invention provides for an in vitro method for the identification of a responder for or a patient sensitive to an HSP90 inhibitor and uses of an oligo- or polynucleotide capable of detecting (an) activating mutation(s) in the KRAS gene are provided. The present invention also relates to a method of monitoring the efficacy of a treatment of a cancer characterized by the presence of at least one activating mutation in the KRAS gene, and, optionally, in the EGFR gene and/or the BRAF gene. In addition, a method of predicting the efficacy of a cancer treatment is described, in particular in a cancer that is characterized by the presence of at least one activating mutation in the KRAS gene, and, optionally, in the EGFR gene and/or the BRAF gene. Also the use of a (transgenic) non-human animal or a (transgenic) cell having at least one activating mutation in the KRAS gene, and, optionally, in the EGFR gene and/or the BRAF gene for screening and/or validation of a medicament for the treatment of said cancer is described and a kit useful for carrying out the methods described herein is provided.

[0002] The dynamics of ongoing efforts to fully annotate the genomes of all major cancer types is reminiscent of that of the Human Genome Project. The analysis of somatic gene copy number alterations and gene mutations associated with cancer (both are here referred to as lesions) will thus provide the genetic landscape of human cancer in the near future. The medical implications of these endeavors are exemplified by the success of molecularly targeted cancer therapeutics in genetically defined tumors: the ERBB2/Her2-targeted antibody trastuzumab shrinks tumors in women with ERBB2-amplified breast cancer (Slamon et al., 2001); the ABL/KIT/PDGFR inhibitor imatinib induces responses in patients with chronic myeloid leukemia carrying the BCR/ABL translocation. (Druker et al., 2001a; Druker et al., 2001b) as well as in gastrointestinal stromal tumors and melanomas hearing (see Hodi et al NEJM 2008) mutations in KIT or PDGFRA (Heinrich et al., 2003); finally, EGFR-mutant lung tumors are highly sensitive to the EGFR inhibitors gefitinib and erlotinib (Lynch et al., 2004; Paez et al., 2004; Pao et al., 2004). In most cases, such discoveries were made after the completion of clinical trials; and as yet no robust mechanism currently exists that permits systematic identification of lesions causing therapeutically relevant oncogene dependency prior to initiation of clinical trials involving patients. Thus, somatic genetic alterations (lesions) in cancer have been causally linked with response to targeted therapeutics as they frequently expose a specific dependence on activated oncogenic signalling pathways. However, no tools currently exist to systematically link such lesions to therapeutic vulnerability.

[0003] K-Ras protein is a GTP-ase involved in regulating cell division. Patients suffering from cancer with mutations in the KRAS gene (e.g. non-small lung cancer, pancreatic cancer, colorectal cancer, breast cancer, leukemias, prostate cancer, lymphomas, brain tumors, pediatric tumors, sarcomas) have a bad prognosis and, in particular, a very low survival rate. Since these disorders cannot be effectively treated the identification of drugs/compounds to which tumors/tumor cell(s) with said KRAS mutations are susceptible is highly desirable. In particular, the identification prior to initiation/completion of clinical trials is desirable avoiding trials involving humans. The term “KRAS” as used herein relates to K-Ras, k-ras and the like and the terms are used as synonyms. However, the term “KRAS” relates mostly to the gene encoding the K-Ras GTP-ase, whereas the term “K-ras”, “K-Ras” or “K-RAS” mostly denotes the encoded protein.

[0004] Cancer cell lines may be used in corresponding in vitro experiments for identification of drugs/compounds to which tumors/tumor cell(s) with the above-mentioned KRAS mutations are susceptible; yet, the validity and clinical interpretability of these widely used models have been questioned. In addition, cell lines are frequently thought to be genomically disarrayed and unstable and therefore likely poorly representative of primary tumors. Furthermore, the genetic diversity of histopathologically defined classes of tumors is often substantial; e.g., the clinical tumor entity non-small cell lung cancer (NSCLC) comprises EGFR- and KRAS-mutant lung adenocarcinomas as well as KRAS-mutant squamous-cell lung cancers. Thus, any representative pre-clinical model would need to capture the nature of lesions of primary tumors as well as their distribution in the histopathologically defined cohort.

[0005] Recent reports have credentialed the use of cancer cell lines in preclinical drug target validation experiments (Lin et al., 2008; McDermott et al., 2007; Neve et al., 2006; Solit et al., 2006). However, these studies either employed cell line collections of mixed cancer lineage (Solit et al., 2006), were focused on large-scale genomic analysis of cancer cell line collections (Lin et al., 2008) or established high-throughput cell line profiling to define cell lines with exquisite inhibitor sensitivity without genomic analyses (McDermott et al., 2007). Thus, somatic genetic alterations (lesions) in cancer have been causally linked with response to targeted therapeutics as they frequently expose a specific dependence on activated oncogenic signalling pathways. However, no tools currently exist to systematically link such lesions to therapeutic vulnerability. Accordingly, an identification of compounds/drugs to which tumors are susceptible is often time-consuming and cost-intensive since these compounds/drugs may only be identified after completion of clinical trials. Also a specific tumor entity (e.g “lung cancer”) may comprise various tumor types characterized by different genomic and/or transcriptional profiles. Therefore, even “same” tumors (tumors belonging to the same tumor entity, such as lung cancer) may not be amenable to treatment with the same drug/compound. Therefore, many patients with tumors belonging to the same tumor entity would profit from an identification of markers/predictors for susceptibility of the specific tumor type to (a) certain drug(s)/compound(s).

[0006] Thus, the technical problem underlying the present invention is the provision of means and methods for the evaluation of cells, in particular tumor cells, for their susceptibility or responsiveness to anti-cancer treatment.

[0007] The technical problem is solved by provision of the embodiments characterized in the claims.

[0008] Accordingly, the present invention relates to a method of selecting (a) cell(s), (a) tissue(s) or (a) cell culture(s) with susceptibility to an HSP90 inhibitor, comprising the steps: (a) determining the presence of at least one mutation in the KRAS gene in said cell, tissue or cell culture; and (b) selecting (a) cell(s), tissue(s) or cell culture(s) with at least one mutation in the KRAS gene. The method may additionally comprise (i) contacting said cell(s), tissue(s) or cell culture(s) with an HSP90 inhibitor; and (ii)) evaluating viability of said cell(s), tissue(s) or cell culture(s) contacted with an HSP90 inhibitor. It is of note that steps (i) and (ii) may be performed prior to step (a) but also after step (a) or, optionally after step (b). Said steps (i) and (ii) may in particular serve as further experimental proof that the selected cell, tissue or cell culture that comprises (an) activating KRAS mutation(s) is susceptible in its viability to an HSP90 inhibitor. The KRAS mutation(s) is/are therefore and preferably “activating mutations”

[0009] As used herein, the term “cell, tissue and cell culture” is not only limited to isolated cells, tissues and cell cultures but also comprises the use of samples, i.e. biological, medical or pathological samples that consist of fluids that comprise such cells, tissues or cell cultures. Such a fluid may be a body fluid or also excrements and may also be a culture sample, like the culture medium from cultured cells or cultured tissues. The body fluids may comprise, but are not limited to blood, serum, plasma, urine, saliva, synovial fluid, spinal fluid, cerebrospinal fluid, tears, stool and the like.

[0010] Accordingly, the gist of the present invention lies in the fact that a method is provided that allows for the determination of the susceptibility of a given cell, tissue or cells in a tissue, (or a cell culture or individual cells in such a cell culture, or as will be explained below, (a) cell(s) in a biological/medical/pathological sample) for the anti-cancer or anti-proliferative treatment with an HSP90 inhibitor. As detailed in the appended examples, it was surprisingly found that cells that comprise an activating mutation in the KRAS gene are in particular susceptible to the treatment with an HSP90 inhibitor. The examples provided herein also show in vivo that HSP90 inhibitors can successfully be employed in the treatment of KRAS-related/KRAS-driven cancers, like KRAS-driven lung adenocarcinomas, i.e. cancers that have an activating mutation in the KRAS gene.

[0011] Therefore, the present invention does not only provide for a method for selecting cells/tissues/cell cultures which are susceptible to an HSP90 inhibitor, but also for an in vitro method for assessing an individual, i.e. a human or animal patient, for its potential responsiveness to an anti-cancer or anti-proliferate treatment with an HSP90 inhibitor. The present invention provides not only for the possibility to select cells, tissues and cell cultures that are susceptible for HSP90 inhibitor treatment (i.e. the selection of e.g. research tools whereon novel HSP90 inhibitors may be tested or which are useful in screening methods for compounds that are suspected to function as a HSP90 inhibitor) but also for a method to evaluate whether a given patient, preferably a human patient, in need of treatment but also prevention of a proliferative disease, is a responder for HSP90 inhibitor treatment. Most preferably, the responsiveness of a given patient to the following HSP90 inhibitors is tested: geldanamycin or a derivative thereof, in particular 17-AAG or IPI-504. These and further HSP90 inhibitors that may be tested are described herein below in more detail.

[0012] The selection method of a HSP90 inhibitor responding cell or a responding patient comprises a step wherein (a) cell(s), tissue(s) or cell culture(s) with at least one mutation in the KRAS gene is selected. Said cell/tissue may also be derived from a human sample, or from a body fluid that comprises such a cell, for example a cancer cell. Said activating mutation is indicative for susceptibility to an HSP90 inhibitor. The term “activating mutation” used herein refers to a mutation in a gene, in particular in the KRAS gene, which leads to an increased activity of the corresponding gene product, i.e. the protein, in particular the KRAS protein. Methods for measuring the (increased) activity of a protein, in particular the KRAS protein, are known in the art and also described herein below. Also exemplary (activating) mutations of the KRAS gene are described herein below. Again, (activating) mutations are preferred in the context of the present invention.

[0013] As pointed out above, and in an alternative embodiment, the present invention relates in particular to a method for determining the responsiveness of a mammalian tumor cell or cancer cell to treatment with an HSP90 inhibitor, said method comprising determining the presence of at least one mutation in the KRAS gene in said tumor cell, wherein said mutation is indicative of whether the cell is likely to respond or is responsive to the treatment. Such a determination may take place on an individual, isolated tumor cell. Such an evaluation may also be carried out on biological/medical/pathological samples, like body fluids, isolated body tissue samples and the like, wherein said samples preferably comprise cells or cell debris to be analyzed.

[0014] As pointed out in the technical problem above, there is a need in the art for markers, which can predict the outcome of an anti-cancer therapy with HSP90 inhibitors prior to and during treatment. There is a need for stratification of patients who are to be subjected to or are being subjected to an anti-cancer therapy with HSP90 inhibitors and distinguishing between HSP90 inhibitor “responder” and “non-responder” patients.

[0015] Subject of the present invention is a method for diagnosing an individual who is to be subjected to or is being subjected to an anti-cancer treatment or an anti-proliferative treatment to asses the responsiveness to HSP90 inhibitor prior, during and/or after HSP90 inhibitor treatment which comprises the steps of (a) detection of at least one (activating) mutation in the KRAS gene in a biological/medical/pathological sample wherein the presence of said at least one (activating) mutation in said KRAS gene is indicative for the responsiveness to HSP90 inhibitor treatment prior, during and after treatment with such an HSP90 inhibitor; and (b) sorting the individual into responder or Non-responder based on detection of said at least one (activating) mutation in the KRAS gene. Preferably, said at least one mutation in the KRAS gene is an activating mutation as defined herein.

[0016] Thus, the invention provides for the first time markers which can predict the outcome of an anti-cancer/anti-proliferative treatment with an HSP90 inhibitor prior to treatment in addition to during and/or after treatment.

[0017] The present invention solves the above identified technical problem since, as documented herein below and in the appended examples, it was surprisingly found that the presence of at least one mutation in the KRAS gene in (a) cell(s), (a) tissue(s) or (a) cell culture (or in a biological sample comprising cells or cell debris) is highly predictive for susceptibility of said cell(s), tissue(s) or cell culture(s) (or the individual who provided said biological sample) to an HSP90 inhibitor.

[0018] Presently, tumors which are characterized by the presence of at least one mutation in the KRAS gene can not be effectively treated, since a specific therapy for said tumors does not exist. Accordingly, patients suffering from cancer or a neoplastic disorder characterized by the presence of at least one mutation in the KRAS gene have a particularly a bad prognosis; see Eberhardt (2005a), J. Clin. Oncol. Non-limiting examples of said neoplastic disorders or cancers are, inter alia, non-small cell lung cancer, lung adenocarcinoma, pancreatic cancer, colorectal cancer, breast cancer, head and neck cancer, ovarian cancer, endometrial cancer, gastrointestinal cancer (including gastric and esophageal cancer), renal cell cancer, urinary tract carcinomas, leukemias, prostate cancer, lymphomas, melanomas, brain tumors, pediatric tumors or sarcomas. All these disorders are well known in the art. Generally, a person skilled in the art will be aware of further exemplary neoplastic disorders/diseases, e.g. neuroendocrine tumor, teratoma or any other type of neoplastic disorders/diseases. The present invention is not limited to the assessment of treatment success of malignant neoplastic disorders/diseases with HSP90 inhibitors but is also envisaged in the assessment of non-malignant neoplastic disorders with HSP90 inhibitors. Non-malignant, neoplastic disorders are, for examples, lipomas, fibromas, myomas, polyps, warts, condylomata and the like. Yet, a particular focus of the present invention is the assessment of potential treatment success with HSP90 inhibitors in malignant neoplastic diseases/cancers/malignant tumors.

[0019] In the present invention, mutations in the KRAS gene were surprisingly identified as markers/predictors for responsiveness to treatment with an HSP90 inhibitor or for susceptibility to an HSP90 inhibitor. The terms “marker” and “predictor” can be used interchangeably and refer to specific allele variants of genes, in particular the KRAS gene and, optionally the EGFR and/or the BRAF gene, which are characterized by the presence of mutations. Exemplary mutations in these genes are described herein below. The presence of these marker/predictor as defined herein correlates significantly (p<0.05) with a responsiveness to treatment with an HSP90 inhibitor/susceptibility to an HSP90 inhibitor. In particular embodiments, any activating KRAS mutation is predictive for a successful treatment (or prevention) of a neoplastic growth (like in cancer) with an HSP90 inhibitor.

[0020] The identification of mutations in the KRAS gene as markers for susceptibility of tumor cell(s) to an HSP90 inhibitor, in particular 17-AAG, provides for the first time a therapeutic approach for patients suffering from cancer characterized by the presence of (a) mutation(s) in the KRAS gene. Treatment of patients with an HSP90 inhibitor may lead to an increase in clinical response rate of, for example, at least 80% and an increase in survival by about 100%. Such an increase in the response rate and survival rate has been shown in the prior art in context of EGFR-mutated lung carcinomas treated with EGFR inhibitors erlotinib and gefitinib.

[0021] HSP90 is involved in the maturation of mutated oncogenes, such as mutated BRAF and mutated EGFR (Shimamura (2005) Cancer Res; Grbovic (2005) PNAS). In the prior art, studies have been performed in order to substantiate the assumption that tumor cells harboring activating mutations in the RAS-RAF pathway are dependent on chaperonage with Hsp90 (Banerji et al., 2008; Hostein et al., 2001). Tumors with mutations in the BRAF gene and the EGFR gene are highly sensitive to HSP90 inhibitors since growth and development of these tumors depend on HSP90 activity in maturation of these mutated BRAF and EGFR proteins. The prior art has speculated that the presence of mutations in BRAF genes and EGFR genes could be considered as a predictive marker for the susceptibility to an HSP90 inhibitor.

[0022] A clinical trial (NCT00431015) investigates the safety and efficacy of the HSP90 Inhibitor IPI-504 treatment of patients suffering from non-small cell lung cancer Smith (Drug Discovery Today: Therapeutic Strategies, 2008). However, the KRAS mutations have neither been described nor proposed in the art as markers for susceptibility of (a) tumor cell(s)/(a) tumor(s) to an HSP90 inhibitor. To the contrary, KRAS mutations have only been described as predictive markers for therapy resistance in the treatment of cancer with chemotherapy alone or in combination with EGFR inhibitors (Pao et al., 2005b), such as erlotinib (Eberhard (2005) J Clin Oncol. 23, 5900-5909), i.e. the art has described KRAS mutations are described as negative markers for susceptibility to EGFR inhibitors. In other words, the art considers tumor cells/tumors characterized by the presence of KRAS mutations as resistant to treatment with EGFR inhibitors, such as erlotinib or gefitinib.

[0023] HSP90 is not even known to be involved in the maturation of mutated KRAS proteins. It was merely known in the art that HSP90 may regulate activation of K-RAS dependent signaling via its client protein BRAF (client proteins being proteins stabilized by HSP90). However, HSP90 stabilizes an abundance of such “client proteins”.

[0024] Previous studies set out in melanoma patients (Banerji U et al.; Mol Cancer Ther, April; 7(4):737-9 2008) implicated NRAS- and BRAF-mutations as potential biomarkers for the response of HSP90 inhibitors. However, the interpretation of the data is limited due to the fact that only six patients were studied. In detail, two patients with metastatic melanoma were reported to have responded to HSP90 inhibition. One of the tumors carried a mutation in BRAF while the other tumor had an NRAS mutation (Banerji et al., Mol Cancer Ther, April; 7(4):737-9 2008). However, given the widespread distribution of BRAF and NRAS mutations which occur in approximately 45-60% (BRAF) and 20-30% (NRAS) of all melanomas, the fact that two patients responded to this treatment does not support the conclusion that such tumors are enriched in the subset of patients that respond to HSP90 inhibition. By contrast, the findings of the present invention, i.e., that KRAS mutant tumors are especially sensitive to HSP90 inhibition is based on an evaluation of a set of cancers that represent the natural distribution of genetic abnormalities in lung cancer. In this set of tumors, KRAS mutant tumors are enriched in the subset of cancers that were sensitive to HSP90 inhibition.

[0025] Furthermore, the finding of the present invention that KRAS is a novel HSP90 client protein is unexpected and surprising. Typical HSP90 client proteins are large proteins with a complex tertiary structure that require extensive folding and processing. The mutant BRAF kinase is such a prototypical example. By contrast, the KRAS protein is a very small protein that does not require extensive structural remodeling in order to become activated. It is to be noted, that KRAS and NRAS, even though they share structural similarities, are independent proteins. In fact, oncogenic transformation by either one of the mutant forms of these proteins requires specific cellular context. For example, BRAF, EGFR and HER2 (i.e. highly complex proteins) are known chaperone targets, since chaperones are essential in correct folding of such large and complex proteins. However, KRAS, a small protein with a relatively simple tertiary structure is not described (and not even speculated on) in the art as a potential HSP90 client/substrate.

[0026] It is explained below that mutant KRAS cannot be grouped together with mutant BRAF or EGFR as HSP90 client proteins and would, thus, not be considered by a skilled person as a putative HSP90 client protein.

[0027] Furthermore, it is shown herein that significant differences between mutant KRAS and the published results on mutant BRAF or EGFR (Shimamura T et al. Can Res 2005; Grbovic O M et al. PNAS 2006) exist. This demonstrates that mutant KRAS cannot be grouped together with mutant BRAF or EGFR as HSP90 client proteins. To the contrary, it is only found herein that KRAS appears to be a novel, atypical client of Hsp90. It is demonstrated in the appended experimental section that mutant KRAS is bound to Hsp90 and is not depleted from the complex by treatment with an HSP90 inhibitor (17-AAG). As shown in the appended examples mutated as well as unmutated KRAS binds to Hsp90; however binding to HSP90 is not inhibited by an HSP90 inhibitor such as 17-AAG. Using the same conditions it was found herein that mutant EGFR is depleted from the complex by 17-AAG treatment as has been suggested previously (Shimamura T et al.; Can Res 2005). Furthermore. KRAS levels are also not modulated outside of the complex.

[0028] However, both c-Raf and AKT levels are modulated by treatment with an HSP90 inhibitor (17-AAG) suggesting, without being bound by theory, that KRAS-mutant cells are killed by HSP90 inhibition because the HSP90 inhibitor depletes two major signaling pathways downstream of KRAS (c-Raf and AKT).

[0029] Without being bound by theory, it is believed that KRAS proteins (and, in particular. KRAS proteins with activating mutations as described herein) are a client/substrate of HSP90 which assists in the folding of (activated) KRAS proteins. It is conceivable that HSP90 prevents via its chaperone activity mutated KRAS proteins (i.e. KRAS having activating mutations) from being degraded; thus, an increased level of (an) activated KRAS protein(s) is maintained. This increased level of (an) activated KRAS protein(s) may contribute to the development and/or enhancement of the herein described cancers (e.g. rise in tumors or enhanced tumor growth). In accordance with the above, it is believed that the herein disclosed HSP90 inhibitors prevent correct folding of activated/mutated KRAS proteins via interfering with HSP90 chaperone activity, thus decreasing the level of activated/mutated KRAS proteins. It is apparent that HSP90 inhibitors are, therefore, useful in the treatment of the herein disclosed cancers and in the herein provided means and methods.

[0030] Again, it is of note that mutated. KRAS proteins have not been described as HSP90 clients and that activating KRAS mutations accordingly have not been described or proposed to be associated with a susceptibility of tumor/cancer cells to HSP90 inhibitors. For example, Smith ((Drug Discovery Today: Ther Strategies, 2008) described that inhibitors exhibit pleiotropic changes as a consequence of the wide range of HSP90 client proteins and the diverse cellular role of HSP90. While prior studies have focused on the analysis of HSP90-dependent maturation of the proto-oncogene Akt, none of these studies has systematically analyzed the sensitivity of KRAS-mutant cells to HSP90 inhibition. Furthermore, the lack of large cell line collections that are heavily annotated genetically has hampered the ability to perform large-scale preclinical analyses into genotype-phenotype relationship. It is the power of the herein described means and methods involving a large collection of tumor cell lines of one particular tumor type that has been characterized in depth which allows the identification of markers for susceptibility/responsiveness to the treatment with an HSP90 inhibitor.

[0031] For example, Smith (Drug Discovery Today: Therapeutic Strategies, 2008) describe a positive correlation between NQO1 expression and 17-AAG sensitivity. Solit (2008) Drug Discovery Today 13, 38-43 describes the relevance of patient selection in the design of HSP90 inhibitor trials. Solit goes on to say that only limited animal studies have been performed with HSP90 inhibitors and that the assumed ability of 17-AAG or other HSP90 inhibitors to degrade putative HSP90 clients has yet to be confirmed by in vivo experiments.

[0032] Accordingly, KRAS mutations are never mentioned in context with susceptibility to HSP90 inhibitors and mutated KRAS proteins are not known as a target of HSP90. Accordingly, the identification of (a) KRAS mutation(s) as markers for susceptibility to an HSP90 inhibitor was unexpected and not anticipated by the prior art.

[0033] As mentioned, patients suffering from cancer with (a) mutation(s) in the KRAS gene have a particularly low survival rate and a had prognosis and known therapies are not effective. These patients will, therefore, profit enormously from the herein described identification of mutations in the KRAS gene as markers for susceptibility to an HSP90 inhibitor. Further, the herein described methods allow the identification of responders for/patients sensitive to an HSP90 prior to initiation of clinical trials involving patients.

[0034] The present invention is illustrated by the experiments described in the appended Example. The experiments show the surprising identification of (a) KRAS mutations) as a predictor of sensitivity to HSP90 inhibitors, in particular to geldanamycin-derivatives such as 17-AAG. Said KRAS mutation(s) were identified as (a) predictor(s)/marker(s) for susceptibility to an Hsp90 inhibitor using the representative NSCLC (non small cell lung cancer) cell line collection as demonstrated in the appended example. This finding was independently validated in the publicly available NCI-60 cell line collection (Garraway et al., 2005; Shoemaker, 2006) (p<0.05). The NCI-60 cell line collection comprises cell lines of diverse tumors and represents most human tumor types. Thus, KRAS mutations are general predictors/markers for susceptibility to an HSP90 inhibitor/responsiveness to treatment with an HSP90 inhibitor. Accordingly, not only NSCLC cancer but any cancer characterized by the presence of (a) mutation(s) in the KRAS gene (e.g. non-small cell lung cancer, lung adenocarcinoma, pancreatic cancer, colorectal cancer, breast cancer, leukemias, prostate cancer, lymphomas, brain tumors, pediatric tumors, sarcomas) can be treated in accordance with the present invention. Preferably, said mutation(s) in the KRAS gene is an activating one. Therefore, in the embodiments described herein it is most preferred that activated KRAS gene mutation are searched, identified and/or evaluated.

[0035] Animal data is provided in the appended examples which demonstrate that activating mutations are indeed indicative for susceptibility to an HSP90 inhibitor. A transgenic mouse model is used in the experimental section below; these transgenic lox-stop-loxKRAS_G12D mice develop aggressive lung adenocarcinoma upon expression of a mutant KRAS allele in the lung (Jackson E L et al.; Genes Dev 2001). The lung tumor-bearing lox-stop-loxKRAS_G12D mice were treated with the exemplary HSP90 inhibitor 17-DMAG (described and defined herein), a more soluble 17-AAG derivative. It is of note that one-week treatment led to tumor regressions in 3 of 4 mice. Although responses were transient, these results clearly confirm the findings described herein using cell lines that tumors with activating KRAS mutations respond to HSP90 inhibitors. This shows that the findings based on the large-scale cell-based screening experiments involving genomically annotated cell line panels are confirmed in vivo.

[0036] One advantage of the present method is the fact that it allows for an in vitro selection of (a) cell(s), (a) tissue(s) or (a) cell culture with susceptibility to an HSP90 inhibitor/responsive to treatment with an HSP90 inhibitor. As documented herein, genomically annotated NSCLC cell lines are used that are representative of the genetic diversity, the transcriptional profile and the phenotypic properties of primary NSCLC (non-small cell lung cancer) tumors. It is shown herein by integrated genomic profiling on a global scale that the genomes of non-small cell king cancer (NSCLC) cell lines are highly representative of several primary NSCLC tumors isolated by surgery from patients in gene copy number, oncogene mutation and gene expression space. Thus, using said NSCLC cell line collection in context of the present invention may avoid animal tests or voluntary tests with cancer patients; at the same time use of said cell line collection allows, in contrast to methods known in the art, the reliable identification of KRAS mutations as markers for susceptibility to HSP90 inhibitors. It is envisaged that other cell line collection may be used herein as long as the highly representative of primary NSCLC tumors, in particular in respect of gene copy number, oncogene mutation and gene expression space. Also computational approaches described herein and used in the appended example, may be used in context of the present invention for the evaluation of experimental data and/or identification of predictors/markers of (a) (tumor) cell(s), (a) (tumor) tissue(s), or (a) (tumor) cell culture for susceptibility to an HSP90 inhibitor. Such computational approaches are known in the art and comprise, inter alia, K-nearest neighbour and statistical tests, such as Fisher's exact test. A person skilled in the art knows how to use these computational approaches in context of the present invention. A skilled person will also be aware of further computational approaches to be used in accordance with the present invention and may adapt said approaches based on his general knowledge. The description herein below and the appended examples provide for a specific selection of cell lines or combination of cell lines which can be used as experimental set in the assessment of markers for drug susceptibility.

[0037] A systematical annotation of the genomes of a large panel of NSCLC cell lines was performed in order to determine whether such a collection reflects the genetic diversity of primary NSCLC tumors. As described in the appended example, the phenotypic validity of this collection was demonstrated, thus confirming that the genomes of non-small cell lung cancer (NSCLC) cell lines are highly representative of primary NSCLC tumors. Said cell lines may, accordingly, be used in analysis of drug activity as a function of genomic lesions in a systematic fashion as described herein.

[0038] Using the systematic similarity profiling described in the appended example, EGFR mutations were confirmed to predict sensitivity to EGFR inhibitors (erlotinib, PD168393, vandetanib) (Arao et al., 2004; Lynch et al., 2004; Paez et al., 2004; Pao et al., 2004; Sos et al., 2008) which is in accordance with prior art observations. A high activity of EGFR inhibitors in EGFR-mutant NSCLC cell lines has been described in the prior art (McDermott et al., 2007; Paez et al., 2004; Tracy et al., 2004). As mentioned, these findings of the prior art have been confirmed herein using an unbiased computational approach employing systematic global measurements of genetic lesions. These findings described in the prior art in respect of the identification of EGFR mutations as predictors/markers for susceptibility to EGFR inhibitors have been confirmed in the present invention, thus demonstrating the overall functional biological validity of the computational approach used in the appended example for the identification of KRAS mutations as predictors/markers for susceptibility to HSP90 inhibitors. For example, EGFR-mutations were identified as markers/predictors of susceptibility to EGFR inhibition (p<0.0001) using the systematic cell-based compound screening followed by computational prediction of sensitivity based on lesion profiles. However, not only EGFR-mutations were identified and confirmed as predictors/markers for susceptibility to EGFR inhibitors but also, and unexpectedly, KRAS mutations as predictors/markers for susceptibility to an HSP90 inhibitor. It is to be understood that in-depth preclinical analysis of activity of cancer therapeutics in tumor cells requires both thorough genomic analysis of a large cell line collection of a single tumor entity and high-throughput cell line profiling, followed by genomic prediction of compound activity as described and demonstrated herein.

[0039] The accuracy of the identification of KRAS mutations as predictors/markers for susceptibility to an HSP90 inhibitor may further be supported by structural modeling of compound binding to HSP90 as shown in the appended example in respect of vandatinib/erlotinib binding in the EGFR kinase domain. Vandatinib/Erlotinib were also formally confirmed as EGFR inhibitors by demonstrating the lack of activity of this compound in Ba/F3 cells expressing the T790M resistance allele. EGFR mutations were also identified herein as predictors/markers for susceptibility to the SRC/ABL inhibitor dasatinib. Without being bound by theory this finding formally proves that mutant EGFR is an actual target of dasatinib (Song et al., 2006).

[0040] The terms “susceptibility to an HSP90 inhibitor” and “responsiveness to treatment with an HSP90 inhibitor” are used interchangeably in context of the present invention. Any explanations given herein in respect to “susceptibility to an HSP90 inhibitor” also apply to “responsiveness to treatment with an HSP90 inhibitor”, mutatis mutandis, and vice versa.

[0041] Technical means and methods for determining the susceptibility to drugs are known in the art. Such methods comprise, inter alia, cell or tissue culture experiments. Through less preferred, it is also envisaged herein that two or more different HSP90 inhibitor(s) (i.e. HSP90 having different chemical formulae, optionally non-structurally related HSP90 inhibitors) may be tested simultaneously. However, it is preferred herein that only one HSP90 inhibitor(s) is tested at one time. Preferred HSP90 inhibitors to be used and tested in the present invention are described herein below.

[0042] The selection methods or method for determining the responsiveness to treatment with an HSP90 inhibitor provided herein may comprise a contacting step/exposing step which is explained in more detail herein below. The term “treatment with an HSP90 inhibitor” as defined herein implies contacting/exposing, for example, a mammalian tumor cell or cancer cell with/to said inhibitor. Of course, also other cells described herein below may be treated with an HSP90 inhibitor.

[0043] These above-mentioned methods may also comprise an evaluation/determination step, which may, for example, include determining the viability of the cell(s), tissue(s) or cell culture(s) contacted with/exposed to an HSP90 inhibitor or (a) mammalian cell(s) treated with an HSP90 inhibitor. For example, (a) cell(s), (a) tissue(s) or (a) cell culture(s) described herein above may show decreased viability upon contacting/exposing/treating with an HSP90 inhibitor. Preferably, the cell(s), tissue(s) or cell culture(s) may show an at least 10%, 20%, 30%, 40%, 50%, 60%, 70%, 80%, and most preferably, 90% reduction in viability compared to control cell(s), tissue(s) or cell culture(s) not contacted/exposed/treated with an HSP90 inhibitor. Preferably, the control cell(s), (a) tissue(s) or (a) cell culture(s) will be identical to the cell(s), (a) tissue(s) or (a) cell culture(s) to be tested as described herein with the only exception that the control (s), (a) tissue(s) or (a) cell culture(s) are not contacted with/exposed to the HSP90 inhibitor.

[0044] Thus (a) cell(s), (a) tissue(s) or (a) cell culture(s) contacted/exposed/treated with an HSP90 inhibitor and showing, for example, a decreased proliferation as described herein above, can be considered as being susceptible to an HSP90 inhibitor. Correspondingly, (a) mammalian cell(s) treated with an HSP90 inhibitor showing such a decreased proliferation can be considered as responsive to treatment with an HSP90 inhibitor. The step of determining the presence of at least one mutation in the KRAS gene and corresponding mutations in the KRAS gene are described herein below. As already mentioned above, it has been surprisingly found in context of this invention that the presence of such a mutation in the KRAS gene is indicative of whether (a) cell(s), (a) tissue(s) or (a) cell culture(s) contacted/treated with or exposed to an HSP90 inhibitor is susceptible to an HSP90 inhibitor or responsive to treatment with an HSP90 inhibitor. A reduction in viability may, for example, be reflected in a decreased proliferation, such as 10%, 20%, 30%, 40%, 50%, 60%, 70%, 80%, and most preferably. 90% reduction in proliferation compared to control cell(s), tissue(s) or cell culture(s) not contacted/exposed/treated with an HSP90 inhibitor. The decreased proliferation may be quantitated, for example, by measuring the total cell volume, tissue volume or cell culture volume using standard techniques.

[0045] The difference in proliferation between contacted/exposed/treated tissue(s) or cell culture(s) and corresponding controls as defined herein may, for example, be evaluated/determined by measuring the volume of the cell(s), tissue(s) or cell culture(s) taking advantage of standard techniques. Said evaluation/determination may be performed in various points in time, for example, 15 minutes, 30 minutes, 60 minutes, 2 hours, 5 hours, 18 hours, 24 hours, 2 days, 3 days, 4 days, 5 days, six days and/or seven days after contacting/treating, said cell(s), tissue(s) or cell culture(s) with an HSP90 inhibitor or exposing said cell(s), tissues) or cell culture(s) to an HSP90 inhibitor. It is envisaged herein that said evaluation/determination may be performed repeatedly, for example, at 15 minutes, 30 minutes and 60 minutes after said contacting/exposing/treating. It is of note that said cell(s), tissue(s) or cell culture(s) may be contacted/treated not only once with said HSP90 inhibitor or exposed to said HSP90 inhibitor but several times (e.g. 2 times, 3 times, 5 times, 10 times or 20 times) under various conditions (e.g. same concentration of inhibitor, different concentration of inhibitor, inhibitor comprised in a composition with different stabilizers, diluents, and/or carriers and the like). Accordingly, said optionally repeated evaluation/determination may be performed after the final contacting/treating with or exposing to said HSP90 inhibitor or in between said above-mentioned various contacting/exposing/treating steps. The explanations given herein above in respect of the exemplary determination/evaluation step, comprising determining the proliferation of the cell(s), tissue(s) or cell culture(s) contacted with/exposed to an HSP90 inhibitor apply to other determination/evaluation steps described herein (e.g. determining the level of HSP90 expression) and further determination/evaluation steps a person skilled in the art will be aware of such as assays that quantitate the induction of apoptotic cell death, senescence or any other cell biology phenotype that is associated with decreased viability or proliferation of tumor cells.

[0046] These selection methods or method for determining the responsiveness to treatment with an HSP90 inhibitor may also comprise determining the level of HSP90 activity, wherein the activity of HSP90 is indicative whether the cell(s), tissue(s) or cell culture(s) is (are) susceptible to an HSP90 inhibitor or is responsive to treatment with an HSP90 inhibitor. As described herein below in context of the determination of the activity of KRAS and optionally of EGFR and/or BRAF, the term “activity” used herein comprises, for example, determining the enzymatic activity at the protein level and/or the determination of the expression level (e.g. mRNA or protein). Methods for determining the activity as defined herein are well known in the art and also described herein below.

[0047] The term “HSP90” (“Heat shock protein 90”) as used in context of this invention refers to a molecular chaperone which is essential for viability in eukaryotic organisms. Heat shock protein 90 is a molecular chaperone that is responsible for correcting misfolded proteins and therefore exerts an important molecular control function in healthy cells. In tumor cells, it was found that mutationally activated oncogenes such as BRAF or EGFR depend on proper maturation by HSP90. Despite the fact that HSP90 has as its original function the protection of cells, tumor cells exploit these capabilities for stabilizing the oncogenes that are driving oncogenic transformation.

[0048] The nucleic acid sequence of various transcript variants of human HSP90 and the corresponding amino acid sequence of HSP90 isoforms are shown in SEQ ID NOs: 137, 139, 141, 143 and 145, and SEQ ID NOs: 138, 140, 142, 144 and 146, respectively. It is speculated in the art that the nucleic acid sequence encoding HSP90AA2 (SEQ ID NO: 145) may be a pseudogene. Generally, the term HSP90 used herein refers to any amino acid sequence having (partial) HSP90 activity as described herein and nucleic acid sequence(s) encoding such (an) amino acid sequence(s).

[0049] The nucleic acid sequences of HSP90 of other mammalian or non-mammalian species (in particular rat, chimpanzee, macaque, C. elegans, Drosophila melanogaster) than the herein provided sequences for human HSP90 can be identified by the skilled person using methods known in the art, e.g. by nucleic acid sequencing or using hybridization assays or by using alignments, either manually or by using computer programs such as those mentioned herein below in connection with the definition of the term “hybridization” and degrees of homology. In one embodiment, the nucleic acid sequence encoding for orthologs of human HSP90 is at least 40% homologous to the nucleic acid sequences as shown in SEQ ID NOs: 137, 139, 141, 143 and 145. More preferably, the nucleic acid sequence encoding for orthologs of human HSP90 is at least 45%, 50%, 55%, 60%, 65%, 70%, 75%, 80%, 85%, 90%, 91%, 92%, 93%, 94%, 95%, 96%, 97% or 98% homologous to the nucleic acid sequence as shown in SEQ ID NOs. 137, 139, 141, 143 and 145, wherein the higher values are preferred. Most preferably, the nucleic acid sequence encoding for orthologs of HSP90 is at least 99% homologous to the nucleic acid sequence as shown in SEQ ID NOs. 137, 139, 141, 143 and 145.

[0050] Hybridization assays for the characterization of orthologs of known nucleic acid sequences/promoters are well known in the art; see e.g. Sambrook, Russell “Molecular Cloning, A Laboratory Manual”, Cold Spring Harbor Laboratory, N.Y. (2001): Ausubel, “Current Protocols in Molecular Biology”, Green Publishing Associates and Wiley Interscience, N.Y. (1989). The term “hybridization” or “hybridizes” as used herein may relate to hybridizations under stringent or non-stringent conditions. If not further specified, the conditions are preferably non-stringent. Said hybridization conditions may be established according to conventional protocols described, e.g. in Sambrook (2001) loc. cit.; Ausubel (1989) loc. cit., or Higgins and Hames (Eds.) “Nucleic acid hybridization, a practical approach” IRL Press Oxford, Washington D.C., (1985). The setting of conditions is well within the skill of the artisan and can be determined according to protocols described in the art. Thus, the detection of only specifically hybridizing sequences will usually require stringent hybridization and washing conditions such as, for example, the highly stringent hybridization conditions of 0.1×SSC, 0.1% SDS at 65° C. or 2×SSC, 60° C., 0.1% SDS. Low stringent hybridization conditions for the detection of homologous or not exactly complementary sequences may, for example, be set at 6×SSC, 1% SDS at 65° C. As is well known, the length of the probe and the composition of the nucleic acid to be determined constitute further parameters of the hybridization conditions.

[0051] In accordance with the present invention, the terms “homology” or “percent homology” or “identical” or “percent identity” or “percentage identity” or “sequence identity” in the context of two or more nucleic acid sequences refers to two or more sequences or subsequences that are the same, or that have a specified percentage of nucleotides that are the same (preferably at least 40% identity, more preferably at least 45%, 50%, 55%, 60%, 65%, 70%, 75%, 80%, 85%, 90%, 91%, 92%, 93%, 94%, 95%, 96%, 97% or 98% identity, most preferably at least 99% identity), when compared and aligned for maximum correspondence over a window of comparison, or over a designated region as measured using a sequence comparison algorithm as known in the art, or by manual alignment and visual inspection. Sequences having, for example, 75% to 90% or greater sequence identity may be considered to be substantially identical. Such a definition also applies to the complement of a test sequence. Preferably the described identity exists over a region that is at least about 15 to 25 nucleotides in length, more preferably, over a region that is at least about 50 to 100 nucleotides in length and most preferably, over a region that is at least about 800 to 1200 nucleotides in length. Those having skill in the art will know how to determine percent identity between/among sequences using, for example, algorithms such as those based on CLUSTALW computer program (Thompson Nucl. Acids Res. 2 (1994), 4673-4680) or FASTDB (Brutlag Comp. App. Biosci. 6 (1990), 237-245), as known in the art.

[0052] Although the FASTDB algorithm typically does not consider internal non-matching deletions or additions in sequences, i.e., gaps, in its calculation, this can be corrected manually to avoid an overestimation of the % identity. CLUSTALW, however, does take sequence gaps into account in its identity calculations. Also available to those having skill in this art are the BLAST and BLAST 2.0 algorithms (Altschul, (1997) Nucl. Acids Res. 25:3389-3402; Altschul (1993) J. Mol. Evol. 36:290-300; Altschul (1990) J. Mol. Biol. 215:403-410). The BLASTN program for nucleic acid sequences uses as defaults a word length (W) of 11, an expectation (E) of 10, M=5, N=4, and a comparison of both strands. The BLOSUM62 scoring matrix (Henikoff (1989) PNAS 89:10915) uses alignments (B) of 50, expectation (E) of 10, M=5, N=4 and a comparison of both strands.

[0053] In order to determine whether a nucleotide residue in a nucleic acid sequence corresponds to a certain position in the nucleotide sequence of e.g. SEQ ID NOs: 137, 139, 141, 143 and 145, the skilled person can use means and methods well-known in the art, e.g., alignments, either manually or by using computer programs such as those mentioned herein. For example, BLAST 2.0, which stands for Basic Local Alignment Search Tool BLAST (Altschul (1997), loc. cit.; Altschul (1993), loc. cit.; Altschul (1990), loc. cit.), can be used to search for local sequence alignments. BLAST, as discussed above, produces alignments of nucleotide sequences to determine sequence similarity. Because of the local nature of the alignments, BLAST is especially useful in determining exact matches or in identifying similar sequences. The fundamental unit of BLAST algorithm output is the High-scoring Segment Pair (HSP). An HSP consists of two sequence fragments of arbitrary but equal lengths whose alignment is locally maximal and for which the alignment score meets or exceeds a threshold or cut-off score set by the user. The BLAST approach is to look for HSPs between a query sequence and a database sequence, to evaluate the statistical significance of any matches found, and to report only those matches, which satisfy the user-selected threshold of significance. The parameter E establishes the statistically significant threshold for reporting database sequence matches. E is interpreted as the upper bound of the expected frequency of chance occurrence of an HSP (or set of HSPs) within the context of the entire database search. Any database sequence whose match satisfies E is reported in the program output.

[0054] Analogous computer techniques using BLAST (Altschul (1997), loc. cit.; Altschul (1993), loc. cit.; Altschul (1990), loc. cit.) are used to search for identical or related molecules in nucleotide databases such as GenBank or EMBL. This analysis is much faster than multiple membrane-based hybridizations. In addition, the sensitivity of the computer search can be modified to determine whether any particular match is categorized as exact or similar. The basis of the search is the product score which is defined as:

$$\frac{\% sequence identity \times \% maximum BLAST score}{100}$$

and it takes into account both the degree of similarity between two sequences and the length of the sequence match. For example, with a product score of 40, the match will be exact within a 1-2% error; and at 70, the match will be exact. Similar molecules are usually identified by selecting those which show product scores between 15 and 40, although lower scores may identify related molecules. Another example for a program capable of generating sequence alignments is the CLUSTALW computer program (Thompson (1994) Nucl. Acids Res. 2:4673-4680) or FASTDB (Brutlag (1990) Comp. App. Biosci. 6:237-245), as known in the art.

[0055] The term “HSP90 inhibitor” means accordingly in this context a compound capable of inhibiting the expression and/or activity of “HSP90” defined herein above. An HSP90 inhibitor may, for example, interfere with transcription of a HSP90 gene, processing (e.g. splicing, export from the nucleus and the like) of the gene product (e.g. unspliced or partially spliced mRNA) and/or translation of the gene product (e.g. mature mRNA). The HSP90 inhibitor may also interfere with further modification (like glycosylation) of the polypeptide/protein encoded by the HSP90 gene and thus completely or partially inhibit the activity of the HSP90 protein as described herein above.

[0056] Furthermore, the HSP90 inhibitor may interfere with interactions of the HSP90 protein with other proteins, in particular with mutant proteins to be stabilized by HSP90 activity.

[0057] Also siRNAs/RNAis, antisense molecules and ribozymes directed against nucleic acid molecules encoding HSP90 are envisaged as (an) HSP90 inhibitor(s) for the use and the method of the present invention. The above-mentioned antagonist/inhibitor of HSP90 may also be a co-suppressive nucleic acid.

[0058] An siRNA approach is, for example, disclosed in Elbashir ((2001), Nature 411, 494-498)). It is also envisaged in accordance with this invention that for example short hairpin RNAs (shRNAs) are employed in accordance with this invention as pharmaceutical composition. The shRNA approach for gene silencing is well known in the art and may comprise the use of st (small temporal) RNAs; see, inter alia, Paddison (2002) Genes Dev. 16, 948-958.

[0059] As mentioned above, approaches for gene silencing are known in the art and comprise “RNA”-approaches like RNAi (iRNA) or siRNA. Successful use of such approaches has been shown in Paddison (2002) loc. cit., Elbashir (2002) Methods 26, 199-213; Novina (2002) Mat. Med, Jun. 3, 2002; Donze (2002) Nucl. Acids Res. 30, e46; Paul (2002) Nat. Biotech 20, 505-508; Lee (2002) Nat. Biotech. 20, 500-505; Miyagashi (2002) Nat. Biotech. 20, 497-500; Yu (2002) PNAS 99, 6047-6052 or Brummelkamp (2002), Science 296, 550-553. These approaches may be vector-based, e.g. the pSUPER vector, or RNA polIII vectors may be employed as illustrated, inter alia, in Yu (2002) loc. cit.; Miyagishi (2002) loc. cit. or Brummelkamp (2002) loc. cit.

[0060] Further HSP90 inhibitors are well known in the art and are, for example, described in (Sharp and Workman, 2006; Solit and Rosen, 2006). However, use of HSP90 inhibitors in accordance with the present invention is not limited to known HSP90 inhibitors. Accordingly, also yet unknown HSP90 inhibitors may be used in accordance with the present invention. Such inhibitors may be identified by the methods described and provided herein and methods known in the art, like high-throughput screening using biochemical assays for inhibition of HSP90 (Sharp and Workman. 2006; Solit and Rosen, 2006). Based on his general knowledge a person skilled in the art is easily in the position to identify inhibitors or verify the inhibiting activity of compounds suspected of being HSP90 inhibitors. These tests may be employed on cell(s) or cell culture(s) described in the appended example, but also further cell(s)/tissue(s)/cell culture(s) may be used, such as cell(s)/tissues)/cell culture(s) derived from biopsies.

[0061] In preferred embodiments of the present invention the HSP90 inhibitor is geldanamycin or a derivative thereof. Geldanamycin (IUPAC name ([18S-(4E,5Z,8R*,9R*,10E,12R*,13S*,14R*,16S*)]-9-[(aminocarbonyl)oxy]-13-hydroxy-8,14,19-trimetoxy-4,10,12,16-tetramethyl-2-azabicyclo[16.3.1.]docosa-4,6,10,18,21-pentan-3,20,22-trion) is a benzoquinone ansamycin antibiotic which may be produced by the bacterium Streptomyces hygroscopicus. Geldanamycin binds specifically to HSP90 (Heat Shock Protein 90) and alters its function. While Hsp90 generally stabilizes folding of proteins and, in particular in tumor cells, folding of overexpressed/mutant proteins such as v-Src, Bcr-Abl and p53, the Hsp90 inhibitor Geldanamycin induces degradation of such proteins.

[0062] The respective formula of geldanamycin is given herein below:

[chemical structure]

[0063] Even though geldanamycin is a potent antitumor agent, the use of geldanamycin also shows some negative side-effects (e.g. hepatotoxicity) which led to the development of geldanamycin analogues/derivatives, in particular analogues/derivatives containing a derivatisation at the 17 position. Without being bound by theory, modification at the 17 position of geldanamycin may lead to decreases hepatotoxicity. Accordingly geldanamycin analogues/derivatives which are modified at the 17 position, such as 17-AAG (17-N-Allylamino-17-demethoxygeldanamycin), are preferred in context of the present invention. Also preferred herein are geldanamycin derivatives to be used in accordance with the present invention which are water-soluble or which can be dissolved in water completely (at least 90%, more preferably 95%, 96%, 97%, 98% and most preferably 99%).

[0064] 17-AAG ([(3S,5S,6R,7S,8E,10R,11S,12E,14E)-21-(allylamino)-6-hydroxy-5,11-dimethoxy-3,7,9,15-tetramethyl-16,20,22-trioxo-17-azabicyclo[16.3.1]docosa-8,12,14,18,21-pentaen-10-yl]carbamate) is as mentioned above a preferred derivative of geldanamycin. 17-AAG is commercially available under the trade name “Tanespimycin” (also known as KOS-953) for example from Kosan Biosciences Incorporated (Acquired by Bristol-Myers Squibb Company). Tanespimycin is presently studied in phase II clinical trials for multiple myeloma and breast cancer and is usually administered intravenously.

[0065] The respective formula of 17-AAG is given herein below:

[chemical structure]

[0066] Preferred geldanamycin-derivative (HSP90 inhibitor) to be used in context of the present invention are IPI-504 (also known as retaspimycin or Medi-561; infinity Pharmaceuticals (MedImmune/Astra Zeneca)). Clinical trials on the use of IPI-504 (which is usually administered intravenously) in the treatment of non-small cell lung cancer (NSCLC) and breast cancer are performed. Also alvespimycin hydrochloride (Kosan Biosciences Incorporated Acquired By: Bristol-Myers Squibb Company) is a highly potent, water-soluble and orally active derivative of geldanamycin preferably used in context of the present invention.

[chemical structure]

[0067] Further geldanamycin-derivatives to be used in accordance with the present invention are, inter alia, ABI010 (Abraxis BioScience, Inc. (ABM) which is a nab-17AAG being developed using nab technology and Retaspimycin hydrochloride, a highly soluble hydroquinone hydrochloride salt of 17-AAG (Infinity Pharmaceuticals Inc (INFI)).

[0068] Other, exemplary derivatives of geldanamycin which may be used in context of the present invention are 17-DMAG (17-NN-Dimethyl Ethylene Diamine-Geldanamycin), and CNF1010 (an ansamycin-based semi-synthetic analogue of geldanamycin (Biogen Idec Inc (BIIB)/Con form a). The anti-tumor activity of 17-DMAG is, for example, described in Hollingshead (2005) Cancer Chemother Pharmacol 56, 115-125. The respective formula of 17-DMAG (also known as alvespimycin) is indicated herein below:

[chemical structure]

[0069] A further geldanamycin-like HSP90 inhibitor to be used in context of the present invention is IPI-493 (orally available inhibitor of HSP90 (Infinity Pharmaceuticals (Medimmune/AstraZeneca)). Clinical phase I trials for IPI-493 are scheduled for 2010.

[0070] Also the use of non-geldanamycin-like HSP90 inhibitors (i.e. HSP90 inhibitors which are not geldanamycin-derivatives as described above) is envisaged in context of the present invention. Non-geldanamycin-like HSP90 inhibitors to be used herein are isoaxoles, in particular 4,5-diaryl-Isoaxol HSP90 inhibitors, for example NVP-AUY922. Isoaxole compounds are known in the art as inhibitors of heat shock proteins; see WO 2004/072051 and WO 2008/104595. NVP-AUY922 (Novartis AG (NVS)), also known as VER-52296 (Vernalis) or AUY922 is known as a potent HSP90 inhibitor and its antitumor activity (e.g. in breast cancer models or in a human colon cancer xenograft model) has also been described; see Brough (2008) J. Med. Chem (2008) 51(2), 196-218 and Jensen (2008) Breast Cancer Res 10:R33. Recently, NVP-AUY922 has entered clinical phase I breast cancer trials.

[chemical structure]

[0071] NVP-AUY922 can be administered intravenously but also oral administration is envisaged.

[0072] Further, non-limiting examples of HSP90 inhibitors which may be used in accordance with the present invention are XL888 (orally available ATP competitive inhibitor (Exelexis))ARQ250RP (ArQule Inc (ARQL), AT13387 (a non-ansamycin inhibitor for oral and intravenous administration; Astex Therapeutics (Private)), BHI001 (a water soluble polyketide; Biotica Technology Limited (Private)), BIIB021(CNF2024) (an orally bioavailable HSP90 inhibitor presently in clinical phase II studies for gastrointestinal stromal tumors (GIST); Biogen Idec Inc (BIIB)/Conforma), HBP-347 (orally available, contains hypericin as an active ingredient and is being tested in clinical phase I/II studies for brain and haematological cancer; Hy BioPharma Inc. (Private)), KW-2478 (intravenous administered and presently in clinical phase I studies for B-cell malignancies; Kirin/Kyowa Hakko Kogyo Co., Ltd), MPC3100 (Myriad Genetics Inc (MYGN)), MPC3160 (orally administered, in clinical phase I studies; Myriad Genetics Inc.), SAR567530 (Sanofi-Aventis (SNY)), SNX-5542 (orally administered, in clinical phase I studies for breast cancer; prodrug; a, water soluble, orally active small molecule; active form: SNX-2122; Pfizer/Serenex, Inc. (Private)), SRN005 (KeyNeurotek AG (Private)) and STA-9090 (intravenous administration; an injectable, small molecule unrelated to geldanamycin or its family of related compounds; in clinical phase I trials for haematological cancer; Synta Pharmaceuticals Corp. (SNTA)). The use of antibodies as HSP90 inhibitors is also envisaged in context of the present invention. For example, the HSP90 inhibitor “Mycograb” may be used which is a human genetically recombinant antibody and binds to the immunodominant fungal antigen heat shock protein 90 (Novartis AG (NVS)).

[0073] As described herein above, it was surprisingly found herein that a mutation in the KRAS gene is indicative for susceptibility to an HSP90 inhibitor or responsiveness to the treatment with an HSP90 inhibitor. Mutations in the KRAS gene are well known in the art and for example described in the COSMIC data base (www.sanger.ac.uk/genetics/CGP/cosmic/). Preferred mutations in the KRAS gene are KRAS_G12C, KRAS_G12R, KRAS_G12D, KRAS_G12A, KRAS_G12S, KRAS_G12V, KRAS_G13D, KRAS_G13S, KRAS_G13C, KRAS_G13V, KRAS_Q61H, KRAS_Q61R. KRAS_Q61P, KRAS_Q61L, KRAS_Q61K, KRAS_Q61E, KRAS_A59T and KRAS_G12F. These mutations and corresponding cell lines carrying such a mutation in the KRAS gene/characterized by such a mutation in the KRAS gene are also shown in FIG. 18. The nucleotide sequences and amino acid sequences of the above-mentioned. KRAS mutations are depicted in SEQ ID NOs: 3 to 78, whereas the nucleic acid sequences of a “wild-type” (i.e. carrying no KRAS mutation) KRAS nucleotide sequences are depicted in SEQ ID NOs:1 and 157 (reflecting two isoforms of KRAS gene). With this information, the person skilled in the art can easily deduce the above-mentioned mutations in the KRAS gene product. Amino acid sequences (of two isoforms of KRAS) are provided in SEQ ID NOs: 2 and 158. Accordingly, the above-mentioned mutations can also be deduced from the two wild-type sequences provided in SEQ ID NOs: 2 and 158. In particular, activating mutations in the KRAS gene are of importance in the embodiments provided herein.

[0074] In one embodiment of the present invention, not only the presence of (a) mutation(s) in the KRAS gene (in particular an activating mutation) is determined, but also, as a further option, a mutation in the EGFR and/or the BRAF gene is additionally determined. The mutation in the EGFR gene to be determined may, for example, be EGFR_D770_N771>AGG; EGFR_D770_N771insG; EGFR_D770_N771insG; EGFR_D770N771insN; EGFR_E709A; EGFR_E709G; EGFR_E709H; EGFR_E709K; EGFR_E709V; EGFR_E746_A750del; EGFR_E746_A750del, T751A; EGFR_E746_A750del, V ins; EGFR_E746_T751del, I ins; EGFR_E746_T751del, S752A; EGFR_E746_T751del, S752D; EGFR_E746 T751del, V ins; EGFR_G719A; EGFR_G719C; EGFR_G719S; EGFR_H773_V774insH; EGFR_T773_V774insNPH; EGFR_F773_V774insPH; EGFR_H773>NPY; EGFR_L747_E749del; EGFR_L747E749del, A750P; EGFR_L747S752del; EGFR_L747 S752del, P753S; EGFR_L747 S752del, Q ins; EGFR_L747_T750del, P ins; EGFR_L747_T751 del; EGFR_L858R; EGFR_L861Q; EGFR_M766_A767insAI; EGFR_P772_H773insV; EGFR_S752_I759del; EGFR_S768I; EGFR_T790M; EGFR_V769_D770insASV; EGFR_V769_D770insASV; and EGFR_V774_C775insHV. It is of note that mutations in EGFR include complex mutations where amino acids are inserted or deleted. In some cases, such event occurs in conjunction with a substitution mutation. In the case of deletions, the amino acids from before the second underscore (“_”) in the mutation formula through the one following the underscore are deleted (e.g., “EGFR_E746_A750del” refers to a mutant version of EGFR where the amino acids 746 through 750 are deleted). In the case of insertions, the insertion occurs in between the two amino acids separated by the underscore (e.g., “EGFR_P772_H773insV” refers to a mutant version of EGFR where the amino acid V is inserted between P772 and H773 of the wild-type sequence). If a substitution or insertion follows an insertion or deletion, the substituted or inserted amino acid is preceded by a comma (“,”) following the description of the insertion or deletion. E.g., the mutation “EGFR_E746_T751del, V ins” refers to a mutant version of EGFR where amino acids E746 through T751 are deleted, followed immediately by an insertion of a V. Alternatively, “EGFR_E746_A750del, T1751A” refers to a mutant version of EGFR where the deletion of amino acids 746 through 750 is followed by a substitution of T751 with A.

[0075] Nucleic acid sequences of a “wild-type” (i.e. carrying no EGFR mutation) EGFR nucleotide sequences are depicted in SEQ ID NOs: 149, 151, 153 and 155 (reflecting four isoforms of EGFR). With this information, the person skilled in the art can easily deduce the above-mentioned mutations in the EGFR gene product. Amino acid sequences of “wild-type” EGFR are provided in SEQ ID NOs: 150, 152, 154 and 156. Accordingly, the above-mentioned mutations can also be deduced from the wild-type sequences provided in SEQ ID NOs: 150, 152, 154 and 156.

[0076] Preferred mutations in the BRAF gene are BRAF_D594G, BRAF_D594V, BRAF_F468C, BRAF_F595L, BRAF_G464E, BRAF_G464R, BRAF_G464V, BRAF_G466A, BRAF_G466E, BRAF_G466R, BRAF_G466V, BRAF_G469A, BRAF_G469E, BRAF_G469R, BRAF_G469R, BRAF_G469S, BRAF_G469V, BRAF_G596R, BRAF_K601E. BRAF_K601N, BRAF_L597Q BRAF_L597R, BRAF_L597S, BRAF_L597V, BRAF_T599I, BRAF_V600E, BRAF_V600K, BRAF_V600L, BRAF_V600R

[0077] The nucleotide sequences and amino acid sequences of the above-mentioned BRAF mutations are depicted in SEQ ID NOs: 79 to 136, whereas the nucleic acid sequence of a “wild-type” (i.e. carrying no BRAF mutation) BRAF nucleotide sequence is depicted in SEQ ID NO:147. With this information, the person skilled in the art can easily deduce the above-mentioned mutations in the BRAF gene product. An amino acid sequence of BRAF is provided in SEQ ID NO: 148. Accordingly, the above-mentioned mutations can also be deduced from the wild-type sequence provided in SEQ ID NO: 148.

[0078] The one (or three) letter code used for annotating the above-mentioned mutations in the amino acid sequences of the (mutated) KRAS gene product, (mutated) EGFR gene product and (mutated) BRAF gene product is well known in the art and may be deduced from standard text books (such as “The Cell”, Garland Publishing, Inc. third edition). A comprehensive list of the specific list of amino acids and their respective abbreviations using the one (or three) letter code is given herein below:

| | | |
|---|---|---|
| Alanine | A | Ala |
| Cysteine | C | Cys |
| Aspartic acid | D | Asp |
| Glutamic acid | E | Glu |
| Phenylalanine | F | Phe |
| Glycine | G | Gly |
| Histidine | H | His |
| Isoleucine | I | Ile |
| Lysine | K | Lys |
| Leucine | L | Leu |
| Methionine | M | Met |
| Asparagine | N | Asn |
| Proline | P | Pro |
| Glutamine | Q | Gln |
| Arginine | R | Arg |
| Serine | S | Ser |
| Threonine | T | Thr |
| Valine | V | Val |
| Tryptophan | W | Trp |
| Tyrosine | Y | Tyr |

[0079] As mentioned above, (a) tumor cell(s)/tumor(s) with (a) mutation(s) in the EGFR and/or the BRAF gene is (are) sensitive to treatment with HSP90 inhibitors. Therefore, it is envisaged that (a) tumor cell(s)/tumor(s) with (a) mutation(s) in the KRAS gene and, optionally, in the EGFR and/or the BRAF gene might be particularly sensitive to treatment with HSP90 inhibitors. Therefore, (a) cell(s), (a) tissue(s) or (a) cell culture selected in accordance with the present method with at least one mutation in the KRAS gene and in the EGFR and/or the BRAF gene might be particularly susceptible to (an) HSP90 inhibitor(s). Accordingly, treatment of patients with an HSP90 inhibitor (the patients suffering from a cancer characterized by the presence of at least one mutation in the KRAS gene and in the EGFR and/or the BRAF gene may be particularly successful in respect of, for example, prognosis or survival rate.

[0080] The determination of the presence of other markers for susceptibility to HSP90 inhibitors in addition to (a) mutation(s) in the KRAS gene and (as a further option), additionally, in the EGFR and/or the BRAF gene is also envisaged herein. Of course, also the presence of markers for susceptibility to other compounds/drugs (e.g. EGFR inhibitors and the like) may be determined in accordance with the present methods. This may be of value in selecting (a) cell(s), (a) tissue(s) or (a) cell culture or in the identification of patients/responders which are not only susceptible/sensitive to (an) HSP90 inhibitor(s) but also to other compounds/drugs (e.g. (an) EGFR inhibitor(s)). These cell(s)/tissue(s)/cell culture(s)/patient(s)/responder(s) may, for example, be subject to co-therapy/co-treatment with an HSP90 inhibitor and a further compound/drug (e.g. (an) EGFR inhibitor(s)).

[0081] Alternatively, (a) cell(s), (a) tissue(s) or (a) cell culture may be selected or patients/responders be identified which are characterized by the presence only of (an) mutations(s) in the KRAS gene but not in the EGFR and/or the BRAF gene and/or optionally further genes indicated herein above. For example, patients suffering from cancer characterized by the presence of at least one mutation in the KRAS gene and (a) mutation(s) in a further gene (e.g. EGFR) may only be treated with an HSP90 inhibitor but not in co-therapy with an EGFR and an HSP90 inhibitor if the patients are known to be resistant to such an EGFR inhibitor. Of course, co-therapy/combination therapy to be used in context of the present invention may also comprise radiation therapy, conventional chemotherapy and the like.

[0082] The mutations in the KRAS gene, the EGFR and/or the BRAF gene and optionally further genes can be detected by methods known in the art. Such methods are, for example described in (Papadopoulos et al., 2006; Shendure et al., 2004). A person skilled in the art is in the position to adapt the methods for detecting mutations in genes described in the above-mentioned documents to the KRAS-, EGFR- and/or the BRAF-mutations described herein and further mutations in these genes known in the art. A person skilled in the art will readily understand that also mutations in said genes not described herein but known in the art or mutations yet to be identified may also be used in the context of the present invention. Exemplary, non-limiting methods to be used in the detection of mutations in the KRAS gene, and optionally in the EGFR and/or the BRAF gene are methods for sequencing of nucleic acids (e.g. Sanger di-deoxy sequencing), “next generation” methods, single molecule sequencing, methods enabling detection of variant alleles/mutations, such as Real-time PCR, PCR-RFLP assay (see Cancer Research 59 (1999), 5169-5175), mass-spectrometric genotyping (e.g. MALDI-TOF), enzymatic methods and SSPC (single strand conformation polymorphism analysis; see Pathol Int (1996) 46, 801-804).

[0083] In particular, such methods may include enzymatic amplification of DNA or cDNA fragments using oligonucleotides specifically hybridizing to exonic or intronic parts of the KRAS gene by per. Given that most (>95%) of all mutations in the KRAS gene occur in exons 2 or three, such amplifications may be carried out in two reactions when employing genomic DNA or even in only a single reaction when employing cDNA. The resulting PCR products may be subjected to either conventional Sanger-based dideoxy nucleotide sequencing methods or employing novel parallel sequencing methods (“next generation sequencing”) such as those marketed by Roche (454 technology), Illumina (Solexa technology) or ABI (Solid technology). Mutations may be identified from sequence reads by comparison with publicly available gene sequence data bases. Alternatively, mutations may be identified by allele-specific incorporation of probes that can either be detected using enzymatic detection reactions, fluorescence, mass spectrometry or others; see Vogeser (2007) Dtsch Arztebl 104 (31-32), A2194-200.

[0084] Paraffin-embedded clinical material may be used in the detection of KRAS mutations. Detection may comprise a histolopathology review of the sample to be tested to ensure tumour tissue is present. A particular assay to be used in the detection method is the DxS Ltd Therascreen™ KRAS Mutation Testing kit, which is designed to detect the 7 most common activating mutations of the KRAS gene. Another commercially available Kit to be used in the detection method is the DxS K-RAS Mutation Test Kit. According to the manufacturer, this kit covers 98.5% of the mutations registered in the COSMIC Release 35 within the large intestine, i.e. the following K-RAS mutations: 12Asp (GGT>GAT), 12Val (GGT>GTT), 12Cys (GGT>TGT), 12Ser (GGT>AGT), 12Ala (GGT>GCT), 12Arg (GGT>CGT) and 13Asp (GGC>GAC). These mutations are also described herein as activating mutations in the KRAS gene which are indicative for susceptibility to an HSP90 inhibitor or responsiveness to the treatment with an HSP90 inhibitor. The correlation of the designations of the K-RAS mutations used in the above kit and used herein is given in the table below:

| | |
|---|---|
| 12Asp (GGT > GAT) | KRAS_G12D |
| 12Val (GGT > GTT) | KRAS_G12V |
| 12Cys (GGT > TGT) | KRAS_G12C |
| 12Ser (GGT > AGT) | KRAS_G12S |
| 12Ala (GGT > GCT) | KRAS_G12A |
| 12Arg (GGT > CGT) | KRAS_G12R |
| 13Asp (GGC > GAC) | KRAS_G13D |

[0085] A person skilled in the art is easily in the position to identify these and further KRAS-mutations denominated in a format as in the above Kit and to correlate these mutations to the activating K-RAS mutations described herein.

[0086] An exemplary detection of KRAS mutations may be performed as follows: serial sections are cut from the paraffin block and DNA is extracted. The DNA is then amplified using a combination of Scorpions™ and ARMS™ (allele specific PCR) technologies to detect the 7 most common nucleotide substitutions, all present in codons 12 and 13 of the KRAS gene. Such a kind of assay is preferably sensitive to 1% of mutant DNA in a background of wild type genomic DNA.

[0087] A positive result in the detection method described above indicates the presence of an activating mutation in the KRAS gene (see also Mitsudomi T and Yatabe Y (2007) Cancer Sci 98:1817-24; Massarelli E et al (2007) Clin Cancer Res 13:2890-96; Finocchiaro G et al (2007) J Clin Oncol, ASCO Annual Meeting Proceedings 25 (18S):4021).

[0088] Further kits to be used for detecting KRAS mutations, are commercially available, for example from DxS Ltd, 48 Grafton Street, Manchester, UK. Such kits may be used for detecting mutations in oncogenes. In particular, TheraScreen may be used for detecting mutations in the EGFR and K-RAS genes. Further validated biomarker kits are commercially available for EGFR, RAS, RAF, BCR-ABL and other genes.

[0089] As described herein below and shown in the appended example, these methods for determining the susceptibility to (an) HSP90 inhibitor(s)/responsiveness to treatment with (an) HSP90 inhibitor(s) may comprise in a first step contacting cell(s), tissue(s) or cell culture(s) with an HSP90 inhibitor or exposing cell(s), tissue(s) or cell culture(s) to an HSP90 inhibitor A person skilled in the art knows how the contacting with/exposing to an HSP90 inhibitor is to be performed. For example, the cell(s), tissue(s) or cell culture(s) may be incubated with an HSP90 inhibitor comprised in a composition with appropriate diluents, stabilizers and/or carriers. The molar concentration of the HSP90 inhibitor to be used in the contacting/exposing step (comprising, for example, incubating the cell(s), tissue(s) or cell culture(s) with an HSP90 inhibitor) are, of course, dependent on the nature of the HSP90 inhibitor. Also diluents, stabilizers and/or carriers to be optionally added in the contacting/exposing step will depend on the nature of the HSP90 inhibitor. However, a person skilled in the art will know which diluents, stabilizers and/or carriers and the like are to be added and will also be aware of appropriate concentrations of diluents, stabilizers and/or carriers and also of the HSP90 inhibitor(s) to be used in the selection method/method for determining the responsiveness of the present invention. Other methods for exposing cells to the HSP90 inhibitor may be the use of cell-matrix or compound arrays, where cells are matrix-bound in array format and can therefore be simultaneously exposed to multiple inhibitors or multiple concentrations of inhibitors or where compounds are matrix-bound in array format an can therefore be simultaneously exposed to multiple types of cells or aliquots of cells.

[0090] Also the use of high throughput screening (HTS) is envisaged in context of the present invention, in particular the screening methods of cell(s), tissue(s) and/or cell culture(s) for responsiveness/sensitivity to an HSP90 inhibitor. Suitable (HTS) approaches are known in the art. An exemplary protocol for such a screening method is also provided in the appended examples; a person skilled in the art is readily in the position to adapt this protocol or known HTS approaches to the performance of the methods of the present invention.

[0091] Screening-assays are usually performed in liquid phase, wherein for each cell/tissue/cell culture to be tested at least one reaction batch is made. Typical containers to be used are micro titer plates having for example, 384, 1536, or 3456 wells (i.e. multiples of the “original” 96 reaction vessels).

[0092] Robotics, data processing and control software, and sensitive detectors, are further commonly used components of a HTS device. Often robot system are used to transport micro titer plates from station to station for addition and mixing of sample(s) and reagent(s), incubating the reagents and final readout (detection). Usually, HTS can be used in the simultaneous preparation, incubation and analysis of many plates.

[0093] The assay can be performed in a singly reaction (which is usually preferred), may, however, also comprise washing and/or transfer steps. Detection can be performed taking advantage of radioactivity, luminescence or fluorescence, like fluorescence-resonance-energytransfer (FRET) and fluorescence polarisation (FP) and the like. The biological samples described herein can also be used in such a context. In particular cellular assays and in vivo assays can be employed in HTS. Cellular assays may also comprise cellular extracts, i.e. extracts from cells, tissues and the like. However, preferred herein is the use of cell(s) or tissue(s) as biological sample (in particular a sample obtained from a patient/subject suffering or being prone to suffer from cancer), whereas in vivo assays (wherein suitable animal models are employed, e.g. the herein described mouse models) are particularly useful in the validation/monitoring of the treatment with an HSP90 inhibitor. Depending on the results of a first assay, follow up assays can be performed by re-running the experiment to collect further data on a narrowed set (e.g. samples found “positive” in the first assay), confirming and refining observations.

[0094] HTS cannot only be employed in identifying cell(s), tissue(s) and/or animal(s) susceptible/responsive to HSP90 inhibitors, or in monitoring the efficacy of a treatment of cancer as described herein; FITS is also useful in identifying further HSP90 inhibitors to be used herein. The screening of compound libraries with usually several hundred thousands of substances takes usually between days and weeks. An experimental high throughput screen may be supplemented (or even be replaced) by a virtual screen. For example, if the structure of the target molecule (e.g. HSP90) is known methods can be employed, which are known under the term “docking”. If the structure of several target-binding molecules is known (e.g. the herein described HSP90 inhibitors) methods for Pharmacophor-Modelling can be used aiming at the development new substances which also bind to the target molecule. A suitable readout in animal (in vivo) models is tumor growth (or respectively the complete or partial inhibition of tumor growth and/or its remission).

[0095] High-throughput methods for the detection of mutations (e.g. KRAS) involve massively parallel sequencing approaches, such as the “picotiter plate pyrosequencing”. This approach relies on emulsion PCR-based clonal amplification of a DNA library adapted onto micron-sized beads and subsequent pyrosequencing-by-synthesis (Thomas R K et al. Nature Med 2007) of each clonally amplified template in a picotiter plate, generating over 200,000 unique clonal sequencing reads per experiment. Furthermore, mass spectrometric genotyping approaches (Thomas R K et al.; Nat Gen 2007) and other next generation sequencing methods (Marguerat S et al.; Biochem Soc Trans 2008).

[0096] The meaning of the terms “cell(s)”, “tissue(s)” and “cell culture(s)” is well known in the art and may, for example, be deduced from “The Cell” (Garland Publishing, Inc., third edition). Generally, the term “cell(s) used herein refers to a single cell or a plurality of cells. The term “plurality of cells” means in the context of the present invention a group of cells comprising more than a single cell. Thereby, the cells out of said group of cells may have a similar function. Said cells may be connected cells and/or separate cells. The term “tissue” in the context of the present invention particularly means a group of cells that perform a similar function. The term “cell culture(s)” means in context of the present invention cells as defined herein above which are grown/cultured under controlled conditions. Cell culture(s) comprise in particular cells (derived/obtained) from multicellular eukaryotes, preferably animals as defined elsewhere herein. It is to be understood that the term “cell culture(s)” as used herein refers also “tissue culture (s)” and/or “organ culture(s)” an “organ” being a group of tissues which perform the some function.

[0097] Preferably, the cell(s), tissue(s) or cell culture(s) to be contacted with/exposed to an HSP90 inhibitor comprise/are derived from or are (a) tumor cell(s). The tumor cells may, for example, be obtained from a biopsy, in particular a biopsy/biopsies from a patient/subject suffering from non-small cell lung cancer, lung adenocarcinoma, pancreatic cancer, colorectal cancer, breast cancer, leukemias, prostate cancer, lymphomas, brain tumors, pediatric tumors or sarcomas or, though less preferred a patient/subject being prone to suffer from said disorders. It is preferred herein that said subject is a human. The term “mammalian tumor cell(s)” used herein refers to (a) tumor cell(s) which is derived from or is a tumor cell from a mammal, the term mammal being derived herein below. As described herein above in respect of “cell(s)”, “tissue(s)” and “cell culture(s)” the “mammalian tumor cells” may be obtained from a biopsy, in particular a biopsy/biopsies from a patient/subject suffering from non-small cell lung cancer, lung adenocarcinoma, pancreatic cancer, colorectal cancer, breast cancer, leukemias, prostate cancer, lymphomas, brain tumors, pediatric tumors or sarcomas or, though less preferred a patient/subject being prone to suffer from said disorders. The term “tumor cell” also relates to “cancer cells”.

[0098] Generally, said tumor cell or cancer cell may be obtained from any biological source/organism, particularly any biological source/organism, suffering from the above-mentioned non-small cell lung cancer, lung adenocarcinoma, pancreatic cancer, colorectal cancer, breast cancer, leukemias, prostate cancer, lymphomas, brain tumors, pediatric tumors or sarcomas.

[0099] Preferably, the (tumor) cell(s) or (cancer) cell to be contacted is (are) obtained/derived from an animal. More preferably, said (tumor)/(cancer) cell(s) is (are) derived from a mammal. The meaning of the terms “animal” or “mammal” is well known in the art and can, for example, be deduced from Wehner und Gehring (1995; Thieme Verlag). Non-limiting examples for mammals are even-toed ungulates such as sheep, cattle and pig, odd-toed angulates such as horses as well as carnivors such as cats and dogs. In the context of this invention, it is particularly envisaged that DNA samples are derived from organisms that are economically, agronomically or scientifically important. Scientifically or experimentally important organisms include, but are not limited to, mice, rats, rabbits, guinea pigs and pigs.

[0100] The tumor cell(s) may also be obtained from primates which comprise lemurs, monkeys and apes. The meaning of the terms “primate”, “lemur”, “monkey” and “ape” is known and may, for example, be deduced by an artisan from Wehner und Gehring (1995, Thieme Verlag). As mentioned above, the tumor or cancer cell(s) is (are) most preferably derived from a human being suffering from the above-mentioned non-small cell lung cancer, lung adenocarcinoma, pancreatic cancer, colorectal cancer, breast cancer, leukemias. In context of this invention particular useful cells, in particular tumor or cancer cells, are, accordingly, human cells. These cells can be obtained from e.g. biopsies or from biological samples but the term “cell” also relates to in vitro cultured cells.

[0101] Preferred cell(s) or cell culture(s) also used in the appended example are shown in appended FIG. 18. Said cell(s)/cell line(s) include but are not limited to H2030, H358, SKLU1, HCC44, H1944. H157, H1355, H2122, H441, HCC461, A427, H1734, H1792, H460, DV-90, Calu1, H2009, A549, LCLC97TM1, HCC515, HOP62, Calu6, H647, HCC1171, H2444 and H2887. These cell lines are well known in the art and may be obtained from ATCC and/or DSMZ and/or from the U.S. National Cancer Institute as part of the NCI60 collection of cancer cell lines (www.lgcpromochem-atcc.com/; www.dsmz.de/; dtp.nci.nih.gov/docs/misc/common_files/cell_list.html).

[0102] These selection methods or method for determining the responsiveness to treatment with an HSP90 inhibitor may also comprise determining the activity/level of expression of HSP90, wherein the activity/level of expression of HSP90 is indicative whether the cell(s), tissue(s) or cell culture(s) is (are) susceptible to an HSP90 inhibitor or is responsive to treatment with an HSP90 inhibitor. The term “activity of HSP90” used herein refers to the activity of a HSP90 protein (protein encoded by a hsp90 gene). The term “expression of HSP90” is used herein interchangeably with “expression of HSP90 gene” and refers to the expression of the hsp90 gene. The definition given herein above in respect of “activity of HSP90”/“expression of HSP90” applies to “activity of KRAS”/“expression of KRAS”, “activity of EGFR”/“expression of EGFR” and “activity of BRAF”/“expression of BRAF”, mutatis mutandis. The It is to be understood that the activity/expression level of HSP90 determined in (a) cell(s), (a) tissue(s) or (a) cell culture(s) contacted with/exposed to an HSP90 inhibitor is compared with the activity/expression level of HSP90 in (a) control cell(s), (a) tissue(s) or (a) cell culture(s), i.e. cell(s), (a) tissue(s) or (a) cell culture(s) not contacted with/exposed to an HSP90 inhibitor. A skilled person will be aware of means and methods for performing such tests and selecting appropriate controls. Preferably, the control cell(s), (a) tissue(s) or (a) cell culture(s) will be identical to the cell(s), (a) tissue(s) or (a) cell culture(s) to be tested as described herein with the only exception that the control (s), (a) tissue(s) or (a) cell culture(s) are not contacted with/exposed to the HSP90 inhibitor.

[0103] Preferably, decreased HSP90 activity/expression levels of HSP90 proteins/polypeptides and/or HSP90 polynucleotides/nucleic acid molecules are indicative of susceptibility to an HSP90 inhibitor or of responsiveness to treatment with an HSP90 inhibitor. It is preferred herein that the HSP90 activity/expression level is decreased by at least 10%, 20%, 30%, 40%, 50%, 60%, 70%, 80% and most preferably by at least 90% in cell(s), (a) tissue(s) or (a) cell culture(s) contacted with/exposed to an HSP90 inhibitor compared with the activity/expression level of HSP90 in (a) control cell(s), (a) control tissue(s) or (a) control cell culture(s). It is of note that the HSP90 activity must not necessarily correlate with the expression level. Thus, it may be, that HSP90 activity is decreased in the presence of an HSP90 inhibitor even though HSP90 expression is increased. However, a person skilled of the art will be aware of this and preferably evaluate HSP90 activity (i.e. activity/function of the HSP90 protein) when determining susceptibility to an HSP90 inhibitor or of responsiveness to treatment with an HSP90 inhibitor.

[0104] As mentioned, a person skilled in the art will be aware of corresponding means and methods for detecting and evaluating the HSP90 activity/expression level. Exemplary methods to be used include but are not limited to molecular assessments such as Western Blots, Northern Blots, Real-Time PCR and the like.

[0105] If the gene product is an RNA, in particular an mRNA (e.g. unspliced, partially spliced or spliced mRNA), determination can be performed by taking advantage of northern blotting techniques, hybridization on microarrays or DNA chips equipped with one or more probes or probe sets specific for mRNA transcripts or PCR techniques referred to above, like, for example, quantitative PCR techniques, such as Real time PCR. These and other suitable methods for binding (specific) mRNA are well known in the art and are, for example, described in Sambrook and Russell (2001, loc. cit.). A skilled person is capable of determining the amount of the component, in particular said gene products, by taking advantage of a correlation, preferably a linear correlation, between the intensity of a detection signal and the amount of the gene product to be determined.

[0106] In case the component is a polypeptide/protein, quantification can be performed by taking advantage of the techniques referred to above, in particular Western blotting techniques. Generally, the skilled person is aware of methods for the quantitation of (a) polypeptide(s)/protein(s). Amounts of purified polypeptide in solution can be determined by physical methods, e.g. photometry. Methods of quantifying a particular polypeptide in a mixture rely on specific binding, e.g of antibodies. Specific detection and quantitation methods exploiting the specificity of antibodies comprise for example immunohistochemistry (in situ). Western blotting combines separation of a mixture of proteins by electrophoresis and specific detection with antibodies. Electrophoresis may be multi-dimensional such as 2D electrophoresis. Usually, polypeptides are separated in 2D electrophoresis by their apparent molecular weight along one dimension and by their isoelectric point along the other direction. Alternatively, protein quantitation methods may involve but are not limited to mass spectrometry or enzyme-linked immunosorbant assay methods.

[0107] In one embodiment, the present invention relates to an in vitro method for the identification of a responder for or a patient sensitive to an HSP90 inhibitor, said method comprising the following steps: (a) obtaining a sample from a patient suspected to suffer from or being prone to suffer from a cancer characterized by the presence of at least one mutation in the KRAS gene, (in particular an activating mutation) and, optionally, in the EGFR and/or the BRAF gene (again in particular an activating mutation in the KRAS gene); and (b) evaluating the presence of at least one mutation in the KRAS gene, and, optionally, the EGFR and/or the BRAF gene; whereby said mutation in the KRAS gene alone or in addition to a mutation in the EGFR and/or the BRAF gene is indicative for a responding patient or is indicative for a sensitivity of said patient to an HSP90 inhibitor. As pointed out herein, in particular activating mutations in the KRAS gene are of importance in the embodiments provided herein.

[0108] Said sample may, for example, be obtained by (a) biopsy (biopsies). Preferably, said sample is obtained from a patient suspected to suffer from or being prone to suffer from cancer. In particular said cancer may be suspected of being characterized by the presence of at least one mutation in the KRAS gene. The cancer may, in addition to the presence of at least one mutation in the KRAS gene be characterized by the presence of at least one mutation in the EGFR gene and/or the BRAF gene. It is preferred herein that said sample is obtained from (a) tumor(s) and, accordingly, is (a) tumor cell(s) or (a) tumor tissue(s). Preferred tumors the sample may be obtained from are non-small cell lung cancer, lung adenocarcinoma, pancreatic cancer, colorectal cancer, breast cancer, leukemias, prostate cancer, lymphomas, brain tumors, pediatric tumors or sarcomas which have already been described above are. A person skilled in the art is easily in the position to identify cancers characterized by the presence of at least one mutation in the KRAS gene using standard techniques known in the art and methods described herein.

[0109] Another embodiment of the present invention relates to the use of an oligo- or polynucleotide capable of detecting (a) mutation(s) of at least one mutation in the KRAS gene for diagnosing sensitivity to an HSP90 inhibitor as defined herein above. Preferably, the oligonucleotide(s) is (are) about 15 to 100 nucleotides in length. A person skilled in the art is, based on his general knowledge and the teaching provided herein, easily in the position to identify and/or prepare (a) an oligo- or polynucleotide capable of detecting at least one mutation in the KRAS gene and, optionally, in the EGFR and/or BRAF gene and/or further genes. In particular these oligo- or polynucleotides may be used as probe(s) in the detection methods described herein A skilled person will know, for example, computer programs which may be useful for the identification of corresponding probes to be used herein. For example, the KRAS nucleic acid sequence (SEQ ID NO: 1 or 157) may be used in this context for identifying specific probes for detecting mutations in the KRAS gene. Likewise probes may be identified using the corresponding sequences coding for EGFR (SEQ ID NO: 149, 151, 153, 155) and BRAF (SEQ ID NO:147), respectively. Exemplary KRAS, EGFR and BRAF nucleic acid sequences are available on corresponding databases, such as the NCBI database (www.ncbi.nlm.nih.gov/sites/entrez). Accordingly, a KRAS nucleic acid sequence can be found in this database under the number “Gene ID: 3845”. Corresponding EGFR and BRAF sequences can be found under the number “Gene ID 1956” and “Gene ID: 673”, respectively. As mentioned, exemplary sequences of a KRAS nucleic acid sequence, EGFR nucleic acid sequence and BRAF nucleic acid sequence are also depicted in SEQ ID NOs: 1 and 157, SEQ ID NO: 149, 151, 153, 155 and SEQ ID NO:147, respectively.

[0110] In a particular embodiment, a method of monitoring the efficacy of a treatment of a cancer is disclosed herein, whereby said cancer is characterized by the presence of at least one mutation in the KRAS gene, and, optionally, in the EGFR and/or the BRAF gene in a subject/patient suffering from said disorder or being prone to suffering from said disorder comprising the steps of
[0111] a) determining in a cell or tissue sample obtained from said subject/patient the activity/expression level of KRAS, and, optionally of EGFR and/or BRAF; and
[0112] b) comparing the activity/expression level of said at least one marker gene determined in a) with a reference or control activity/expression level of KRAS, and, optionally of EGFR and/or BRAF, wherein the extent of the difference between said activity/expression level determined in a) and said reference activity/expression level is indicative for said efficacy of a treatment of said cancer.

[0113] The term “activity” as used herein refers to the activity of a protein as described elsewhere herein, whereas the term expression level refers to expression on a protein level (e.g. to be determined by Western Blots and the like) or transcriptional level (e.g. spliced, unspliced or partially spliced mRNA, which may be determined by Northern Blots, Real time PCR and the like). Marker genes referred to in the context of the monitoring methods or methods of predicting the efficacy of a treatment are in particular the KRAS gene, and, optionally the EGFR gene and/or BRAF gene. Again, in particular activating mutations in the KRAS gene are of importance in the embodiments provided herein.

[0114] The method of monitoring the efficacy of a treatment of a cancer may comprise a step of determining in a cell or tissue sample obtained from a subject/patient suffering from said cancer (e.g. a biopsy) the presence of at least one mutation in the KRAS gene. The monitoring method may comprise, in addition to determining at least one mutation in the KRAS gene, determining the presence of at least one mutation in the EGFR gene and/or BRAF gene. For example, a mutation in the KRAS gene (and, optionally, in the EGFR gene and/or BRAF gene) may be present in a sample before start of the treatment of a cancer. During or after treatment of the cancer, the tumor cells having the mutation(s) in the KRAS gene (and, optionally, in the EGFR gene and/or BRAF gene) are erased or otherwise depleted. Thus, the absence of a detectable mutation in the KRAS gene (and, optionally, in the EGFR gene and/or BRAF gene) in a sample (cell samples/biopsy samples and the like) obtained from a subject/patient during or after treatment of a cancer is indicative of the efficacy of the treatment.

[0115] The present invention also relates to a method of predicting the efficacy of a treatment of a cancer characterized by the presence of at least one mutation in the KRAS gene, and, optionally, in the EGFR and/or the BRAF gene for a subject/patient suffering from said disorder or being prone to suffering from said disorder comprising the steps of a) determining in a cell or tissue sample obtained from said subject/patient the activity of KRAS, and, optionally, EGFR and/or BRAF activity/expression level of at least one marker gene selected from the group consisting of KRAS, EGFR and/or BRAF; and b) comparing the activity of KRAS, and, optionally, EGFR and/or BRAF activity/expression level of said at least one marker gene determined in a) with a reference activity or reference expression level of KRAS, and, optionally, EGFR and/or BRAF reference activity of reference expression level, optionally determined in a cell or tissue sample obtained from a control subject/patient (responder and/or non-responder), wherein the extent of the difference between said activity or expression level determined in a) and said reference or control activity or reference or control expression level is indicative for the predicted efficacy of a treatment of cancer. Also here, it is to be pointed out that in particular activating KRAS gene mutations are of interest in this embodiment.

[0116] The treatment of cancer characterized by the presence of at least one mutation in the KRAS gene, and, optionally, in the EGFR and/or the BRAF gene may comprise the administration of an HSP90 inhibitor as defined herein above.

[0117] it has been demonstrated in context of this invention that mutations in the KRAS gene as disclosed herein act as markers/predictors for susceptibility to an HSP90 inhibitor. In particular a responder for or a patient sensitive to an HSP90 inhibitor may be identified in accordance with the present method. Accordingly, the present invention provides the possibility to recognize (aberrant) changes of KRAS activity immediately once they occur, for example, by determining the activity of said marker gene(s). In an alternative, (aberrant) changes of HSP90 activity may be recognized.

[0118] The activity of (mutated) KRAS and, optionally, (mutated) EGFR, (mutated) BRAF and/or HSP90 may, not only be determined by measuring the expression level but also, be determined, for example, by measuring substrate turnover in case of HSP90 or EGFR or by measuring GTPase activity of KRAS or by measuring the activation of downstream signaling pathway members, e.g., by determining the level of phospho-Akt or phospho-Erk. in case of KRAS or the phosphorylation levels of BRAF or Erk in the case of BRAF. Means and methods for determining the activity of said proteins are well known in the art and may, for example, be deduced from Lottspeich (Spektrum Akademischer Verlag, 1998). As mentioned herein above, determining the activity may comprise determining the expression level. Accordingly, in an alternative, the expression status (i.e. expression of gene products such as mRNA and/or proteins) of (mutated) KRAS, (mutated) EGFR, (mutated) BRAF and/or HSP90 can be determined by standard techniques, (A) mutation(s) in the KRAS gene and, optionally, EGFR gene and/or BRAF gene does not necessarily correlate with a change in the expression level of these genes. In context of the present invention it is therefore preferred that the activity of (mutated) KRAS and, optionally, (mutated) EGFR, (mutated) BRAF is not determined by measuring the expression status of these genes but by alternative methods which reflect, for example, the enzymatic activity of the corresponding proteins. It is of note that, for example, the enzymatic activity of proteins encoded by a mutated KRAS gene, and optionally a mutated EGFR gene and/or mutated BRAF gene may differ from that of the respective proteins encoded by wild type genes (i.e. reference activity) without a change in the expression level. Preferably, mutated KRAS and, optionally, mutated EGFR, mutated BRAF show an increased activity compared to wild type KRAS and, optionally, wild type EGFR and/or wild type BRAF (controls). In particular the enzymatic activity and/or the expression level described herein above are increased. Exemplary ranges of changes in the activity compared to “normal” activity (i.e. activity of wild-type KRAS, and optionally, wild-type EGFR and/or wild-type BRAF) are described herein below. The term “Wild type” used herein refers to the “original” nucleic acid sequences and amino acid sequences/proteins encoded thereby, in particular nucleic acid sequences without the mutations described herein in context of “KRAS mutations” “EGFR mutations” and “BRAF mutations”. An “increased activity” according to the present invention relates to a higher activity, in particular activating mutation in the KRAS, than shown by the identified wild-type (KRAS) gene.

[0119] In addition or in alternative to the activity of the herein above described proteins encoded by the “marker genes” KRAS, EGFR and/or BRAF also the activity/expression level of c-RAF and/or Aktin may be measured/determined. C-RAF genes and Aktin genes and corresponding proteins are well known in the art and the expression status of these proteins has also been determined in the appended example. C-RAF and/or Aktin may, accordingly, also be used as “marker genes” in context of the present invention. All explanations given herein below in respect of KRAS, EGFR and/or BRAF in context of methods of monitoring the efficacy of a treatment or methods of predicting the efficacy of a treatment also apply to C-RAF and/or Aktin, mutatis mutandis.

[0120] Based on these findings, the present invention provides the particular advantages that, by determining the expression level or activity of KRAS, and, optionally, EGFR and/or BRAF activity or expression level of at least one of said marker genes in accordance with this invention, (aberrant) changes of mutated KRAS and, optionally, mutated EGFR, mutated BRAF and/or HSP90 activity/expression level can be recognized early, i.e. that the efficacy of a treatment of a cancer characterized by the presence of at least one mutation in the KRAS and, optionally, in the EGFR gene, and/or BRAF gene can be monitored early and that the efficacy of a treatment of said cancer can be predicted early. Hence, also a possible resistance to the treatment can be recognized early by using the means and method of this invention.

[0121] In a particular embodiment, the present invention relates to corresponding means, methods and uses which are based on the early recognition of (aberrant) changes of mutated KRAS and, optionally, mutated EGFR, mutated BRAF and/or HSP90 activity/expression level of the respective genes. The possibility of recognizing (aberrant) changes of mutated KRAS and, optionally, mutated EGFR, mutated BRAF and/or HSP90 activity/expression level early, provides several advantages, like a higher lifespan/likelihood of survival of the subject/patient (for example due to the notice of possible treatment failures and a corresponding change of the treatment regimen) and the possibility of a more efficient therapy (for example due to the possibility to avoid/recognize treatment failures early and, hence, to correspondingly change the treatment regimen early in therapy, i.e. to timely switch to a more suited inhibitor, to discontinue an expensive, ineffective treatment early after diagnosis and to opt for alternative therapy).

[0122] In context of the above embodiments of this invention, “early” particularly means prior to (the onset of) a (complete or partial) cytogenetic or haematological response or a response measured by any type of imaging technique and/or prior to the outbreak of the cancer characterized by the presence of at least one mutation in the KRAS and, optionally, in the EGFR gene, and/or BRAF gene (or susceptibility thereto).

[0123] For example, “early” monitoring the efficacy of a therapy/treatment of said cancer may be at least 1, at least 2, at least 3, at least 4, at least 5, at least 6, at least 7, at least 10, or at least 14 days prior to (the onset of) a (partial) cytogenetic or haematological response or a response measured by any type of imaging technique to said therapy/treatment and/or at least 1, at least 2, at least 3, at least 4, at least 5, at least 6, at least 7, at least 10, at least 12, at least 15, or at least 18 month prior a complete cytogenetic or haematological response or a response measured by any type of imaging technique to said therapy/treatment (of the patient or control patient (responder)), wherein the longer periods are preferred.

[0124] Alternatively, “early” monitoring the efficacy of a therapy/treatment of said cancer may also be at most 1, at most 2, at most 3, at most 4, at most 5, at most 6, at most 7, at most 10, or at most 14 days after (onset of) the therapy/treatment of said cancer, wherein the shorter periods are preferred. Most preferably, it is envisaged to already monitor the efficacy of a therapy/treatment of said cancer at the day the therapy/treatment was initiated, i.e. once the mutated KRAS and, optionally, mutated EGFR, mutated BRAF and/or HSP90 activity/expression level changes upon said therapy/treatment.

[0125] In the following, a non-limiting example of a scheme for (early) monitoring the efficacy of a therapy/treatment of the cancer defined herein in accordance with this invention is provided:
[0126] When monitoring the therapy/treatment of said cancer (for example therapy/treatment based on an HSP90 inhibitor as described herein (e.g. 17-AAG)), activity of KRAS, and, optionally, EGFR and/or BRAF activity/expression level(s) of the marker gene(s) (i.e. mutated KRAS and, optionally, mutated EGFR, mutated BRAF and/or HSP90) may be determined daily during the first week after initiation of the therapy/treatment, weekly during the first month of the therapy/treatment and, afterwards, monthly.
[0127] The reference activity/expression level may be taken at the day the therapy/treatment is initiated, from the subject/patient to be treated and/or from a corresponding control subject/patient (responder/non-responder); see below.
[0128] If a rise in marker levels is observed in two consecutive samples, or if decrease in marker level is not fast enough (for example not as fast as that of responder or not sufficiently faster than that of a non-responder), change of treatment regimen may be considered.

[0129] It is of note that this example is in no way limiting. The skilled person is readily in the position to adapt this scheme to the particular requirements relevant for each individual case, based on the teaching provided herein an on his common general knowledge.

[0130] For example, “early” predicting the efficacy of a therapy/treatment of the cancer defined herein may be at least 1, at least 2, at least 3, at least 4, at least 5, at least 6, at least 7, at least 10, or at least 14 days prior to (the onset of) a (partial) cytogenetic or haematological response to said therapy/treatment and/or at least 1, at least 2, at least 3, at least 4, at least 5, at least 6, at least 7, at least 10, at least 12, at least 15, or at least 18 month prior a complete cytogenetic or haematological response or a response measured by any type of imaging technique to said therapy/treatment, wherein the longer periods are preferred.

[0131] Alternatively, “early” predicting the efficacy of a therapy/treatment of the cancer defined herein may also be at most 1, at most 2, at most 3, at most 4, at most 5, at most 6, at most 7, at most 10, or at most 14 days after (onset of) the therapy/treatment of the cancer defined herein, wherein the shorter periods are preferred. Most preferably, it is envisaged to already monitor the efficacy of a therapy/treatment of said cancer at the day the therapy/treatment was initiated, i.e. once the mutated KRAS and, optionally, mutated EGFR, mutated BRAF and/or HSP90 activity/expression level changes upon said therapy/treatment.

[0132] Furthermore, “early” predicting the efficacy of a therapy/treatment of the cancer defined herein may also be at most 1, at most 2, at most 3, at most 4, at most 5, at most 6, at most 7, at most 10, or at most 14 days after diagnosis of the cancer, wherein the shorter periods are preferred. Most preferably, it is envisaged to already predict the efficacy of a therapy/treatment of said cancer at the day of diagnosis.

[0133] As mentioned, the present invention is particularly useful for monitoring the efficacy of a therapy/treatment of the cancer as defined herein. Corresponding means, uses and methods are provided herein. In general, monitoring the efficacy of a certain kind of therapy/treatment is regularly applied in clinical routine. Hence, the skilled person is aware of the meaning of monitoring the efficacy of a certain kind of therapy/treatment. In context of this invention, the meaning of the term “monitoring” encompasses the meaning of terms like “tracking”, “discovering” etc. In particular, the term “monitoring the efficacy of a therapy/treatment of a cancer characterized by the presence of at least one mutation in the KRAS gene, and, optionally, in the EGFR and/or the BRAF gene” as used herein refers to monitoring whether a subject/patient suffering from said disorder (or being prone to suffering from said cancer) responds at all to a therapy/treatment of said disorder and/or how the course of said respond is (e.g. how fast/slow the respond is and/or to what extent the respond is).

[0134] The present invention is further useful for predicting the efficacy of a therapy/treatment of the cancer as defined herein. Corresponding means, uses and methods are also provided herein. In general, predicting the efficacy of a certain kind of therapy/treatment is highly desired in clinical routine, since it allows for preventing the disorder and/or increasing the efficiency of a therapy/treatment and hence, leads to savings in cost and time and to a higher lifespan/likelihood of survival/‘Genesung’ of the affected patient. The definitions given with respect to the term “efficacy of a therapy/treatment of a cancer characterized by the presence of at least one mutation in the KRAS gene, and, optionally, in the EGFR and/or the BRAF gene” provided herein apply here, mutatis mutandis. In context of this invention, the term “predicting the efficacy of a therapy/treatment of a cancer characterized by the presence of at least one mutation in the KRAS gene, and, optionally, in the EGFR and/or the BRAF gene for a subject/patient” is used in basically the same sense like determining whether, and/or to what extent, a subject/patient exhibits susceptibility to such therapy/treatment, i.e. whether said subject/patient will or would respond at all to a therapy/treatment of said disorder and/or how the course of said respond will or would be (e.g. how fast/slow the respond is and/or to what extent the respond is). In particular, a subject/patient exhibits susceptibility to said cancer in accordance with this invention, when its mutated KRAS and, optionally, mutated EGFR, mutated BRAF and/or HSP90 activity/expression level is aberrant.

[0135] In one embodiment, the “predicting the efficacy of a therapy/treatment of the cancer defined herein” in accordance with this invention may be performed after initiation of the therapy/treatment, i.e. during the already ongoing therapy/treatment. In particular, said “predicting” may be performed during the herein described monitoring the efficacy of a therapy/treatment of said cancer, preferably early after the beginning of said monitoring. Thereby, the predicting may be based on results from said monitoring obtained at a certain point in time of the ongoing therapy/treatment. Preferably, said point in time is an early point in time, like, for example that point in time, when a first result from said monitoring has been obtained. In cases where the “predicting the efficacy of a therapy/treatment of the cancer defined herein” is performed during an already ongoing therapy/treatment, it refers to the following/subsequent efficacy of said therapy/treatment.

[0136] In another embodiment, the “predicting the efficacy of a therapy/treatment of the cancer defined herein” in accordance with this invention may be performed (immediately) after diagnosis but, however, prior to initiation of the therapy/treatment. In such cases, “predicting the efficacy of a therapy/treatment of said cancer” refers to the efficacy of a therapy/treatment which has not yet been initiated (or has been initiated substantially at the same point in time when the “predicting” was performed.

[0137] In context of this embodiment of the invention, one non-limiting example of a healthy control subject/patient is one having (a) wild-type KRAS gene(s), in particular (a) wild-type KRAS gene(s) with respect to a mutation leading to an aberrant activity/aberrant expression of KRAS. In other words said healthy control subject/patient is one not having a form of a KRAS gene with a mutation leading to an aberrant activity/aberrant expression of KRAS (for example the presence of the KRAS_G12C, KRAS_G12R, KRAS_G12D, KRAS_G1.2A, KRAS_G12S, KRAS_G12V, KRAS_G13D, KRAS_G13S, KRAS_G13C, KRAS_G13V, KRAS_Q61H, KRAS_Q61R, KRAS_Q61P, KRAS_Q61L, KRAS_Q61K, KRAS_Q61E, KRAS_A59T and KRAS_G12F mutations). These mutations are also shown in appended SEQ ID NOs 3 to 78.

[0138] In accordance with the above, the reference activity or expression level of KRAS, and, optionally (i.e. in addition to the determination of the activity/expression level of KRAS) EGFR and/or BRAF reference activity or reference expression level with respect to the means, methods and uses of monitoring the efficacy of a treatment of a cancer as defined herein, is that determined in (a sample of) the corresponding healthy control subject, i.e. is the “normal” activity/expression level.

[0139] It is to be understood that an aberrant activity or expression level of the marker genes described herein means that the activity or expression level of KRAS, and, optionally (i.e. in addition to the determination of the activity/expression level of KRAS) EGFR and/or BRAF activity/expression level as described herein is different from the above described reference activity or reference expression level of KRAS, and, optionally, EGFR activity/expression level and/or BRAF activity/expression level. The reference activity or reference expression level of these marker genes is in this context, accordingly, the “normal” activity/expression level. In particular with respect to the herein disclosed means, methods and uses of monitoring/predicting the efficacy of a treatment of the cancer as defined herein, the control subject/patient is, in one embodiment, envisaged to be a subject/patient suffering from said cancer or being prone to suffering from said cancer, i.e. a subject/patient having, for example, an aberrant activity/expression level of KRAS and, hence, not a “normal” activity of KRAS activity or normal KRAS expression level as described in accordance with this invention.

[0140] Thereby, it is clear that “different” activity or expression level means higher or lower, depending on whether the cancer defined and described herein comes along with an up- or down-regulated activity of KRAS, and optionally (i.e. in addition to the determination of the activity/expression level of KRAS), EGFR and/or BRAF activity or expression level.

[0141] In this context, “different”, “higher” or “lower” means different, higher or lower than the normal (range of) activity or expression of KRAS, and, optionally, (i.e. in addition to the determination of the activity/expression level of KRAS) EGFR and/or BRAF activity or expression level. For example, different, higher or lower means at least 1.5 fold, at least 2 fold, at least 2.5 fold, at least 3 fold, at least 4 fold, at least 5 fold, at least 7 fold, at least 10 fold, at least 15 fold, at least 25 fold, at least 50 fold, at least 100 fold, at least 200 fold different, higher or lower, wherein the higher values are preferred.

[0142] Whether the activity or expression level changes (i.e., in a certain direction like “higher” or “lower”) and to which extent the activity or expression level of KRAS changes can easily be deduced by the skilled person based on the teaching provided herein and the common general knowledge. As pointed out herein, in addition to the KRAS modifications also the expression level and/or activity of EGFR and/or BRAF may be measured assessed. This optional measurement or assessment of EGFR and/or BRAF activity and/or expression level, can also be easily deduced by the skilled person based on the teaching provided herein and the common general knowledge.

[0143] It is particularly preferred in this context that the control subject/patient is subjected to the same treatment of the cancer described and defined herein as the subject/patient itself and/or that it is known whether the control subject/patient is a responder or non-responder to this treatment.

[0144] Whether a subject/patient is a “responder” or “non-responder” with respect to a certain kind of cancer treatment/therapy can be evaluated by the skilled person on the basis of his common general knowledge and/or the teaching provided herein. Accordingly, the patient responds to cancer treatment/therapy, if expression/activity of KRAS, and optionally. EGFR and/or BRAF is reduced upon said treatment/therapy. Preferably, the expression/activity of KRAS, and optionally, EGFR and/or BRAF is reduced to control expression/activity (e.g. determined in a sample obtained from a person not suffering from said cancer). In other words, a reduction in expression level or activity of KRAS, and optionally, EGFR and/or BRAF is indicative for a successful treatment/therapy. A skilled person is readily in the position to determine whether a patient responds to cancer treatment/therapy by evaluation of the expression level or activity of KRAS, and optionally, of EGFR and/or of BRAF. In addition to the evaluation of said expression level or activity, a person skilled in the art may also determine cytological/haematological parameters characteristic for a specific cancer in order to assess whether a patient responds to cancer treatment/therapy.

[0145] In contrast, a patient who does not respond to treatment/therapy does not show a reduced expression level or activity of KRAS, and optionally, a reduced expression level or reduced activity of EGFR and/or of BRAF upon said treatment/therapy. This is in contrast to “responders/responding patients”, showing such a reduced expression level and/or such a reduced activity.

[0146] In particular, a “responder” may be a subject/patient whose cytological/haematological parameters and/or (aberrant) KRAS activity or expression level (and hence the corresponding marker gene expression level(s)) activity of KRAS, and, optionally, EGFR and/or BRAF change towards the their “normal” activity/(protein or mRNA expression) level(s) (in a sufficient manner) upon the cancer treatment/therapy. In one specific embodiment, a “responder” may be a subject/patient not suffering from one of the herein defined resistances. In particular, a “non-responder” may be a subject/patient whose cytological/haematological parameters and/or (aberrant) activity or expression level of KRAS, and, optionally, EGFR and/or BRAF activity or expression level (and hence the corresponding marker gene expression level(s)) do not change towards their “normal” (expression) level(s) (in a sufficient manner) upon the cancer treatment/therapy. In one specific embodiment, a “non-responder” may be a subject/patient suffering from one of the herein defined resistances.

[0147] In context of this embodiment of the invention, one non-limiting example of a (diseased) control subject/patient (responder and/or non-responder) suffering from a cancer defined herein or being prone to suffering from a susceptibility thereto is one having a mutated form of a KRAS gene leading to an aberrant KRAS activity/expression of KRAS.

[0148] The skilled person is aware of how a typical/desired response to a known therapy/treatment of a known cancer characterized by the presence of at least one mutation in the KRAS gene (e.g. non-small cell lung cancer, lung adenocarcinoma, pancreatic cancer, colorectal cancer) should proceed or is intended to proceed. Moreover, the skilled person can consider how a typical/desired response to a (unknown) therapy/treatment of a (unknown) cancer characterized by the presence of at least one mutation in the KRAS gene proceeds or is intended to proceed. Based on this knowledge, the means, methods and uses of this invention referring to the efficacy of a therapy/treatment of such a cancer can, for example, also be carried out without employing (a sample of) a particular control subject/patient, i.e. without comparing the “activity of KRAS, and, optionally, EGFR and/or BRAF activity or expression level of at least one marker gene” with a “reference activity of KRAS, and, optionally, EGFR and/or BRAF reference activity or reference expression level determined in (a sample from) a control subject/patient. Simply by comparing the course of the determined “activity of KRAS”, and, optionally, “activity of EGFR” and/or “activity of BRAF” or “expression level of KRAS”, and, optionally, “expression level of EGFR” and/or “expression level of BRAF” during the therapy/treatment of a cancer with the above-mentioned known “typical/desired response”, the skilled person is able to consider about the efficacy of the therapy/treatment monitored/predicted. If the response of a subject/patient is as fast (or even faster) than the “typical/desired response”, the subject/patient is a “responder”. If the response of a subject/patient is slower than the “typical/desired response”, the subject/patient is a “non-responder” (when no substantial response can be seen) or “weak-responder”.

[0149] In general, a (desired) efficacy of a treatment of a cancer described herein or susceptibility thereto is indicated/predicted, when the aberrant (i.e. enhanced or decreased) activity or expression level of KRAS, and, optionally, EGFR and/or BRAF activity or expression level of the “marker gene” is shifted back towards the “normal level” of a (healthy) control subject/patient due to/in consequence of said treatment of the cancer or susceptibility thereto.

[0150] In context of this invention, the efficacy of a treatment of the cancer defined herein is high, when the subject/patient (to be) treated responds as fast (or even faster) and as complete as a “responder”, i.e. exhibits a “typical/desired response”. This means that said subject/patient reaches the “normal” level of the relevant cytological/haematological parameters and/or KRAS activity (and hence of the corresponding marker gene expression level(s)) of a healthy subject/patient as fast as a “responder”, i.e. in the same manner as in a “typical/desired response”.

[0151] In context of this invention, the efficacy of a treatment of the cancer defined herein is moderate/low, when the subject/patient (to be) treated responds not as fast and/or not as complete as a “responder”, i.e. does not exhibit a “typical/desired response”. This means that said subject/patient does not reach the “normal” level of the relevant cytological/haematological parameters and/or activity or expression level of KRAS, and, optionally, the “normal” level of activity or expression level of EGFR and/or of BRAF (and hence of the corresponding marker gene expression level(s)). Accordingly, a moderate/low efficacy means also that the activity/expression level of KRAS, and, optionally, of EGFR and/or of BRAF of a healthy subject/patient is not reached as complete and/or as fast as a “responder”, i.e. not in the same manner as in a “typical/desired response”.

[0152] In context of this invention, there is no efficacy of a treatment of the cancer at all, when the subject/patient (to be) treated does not respond at all.

[0153] Particularly, when the efficacy of a treatment of the cancer as monitored/predicted in context of this invention is moderate/low or, if there is no such efficacy, a change of the (planned) therapy/treatment might be considered.

[0154] In an alternative embodiment, of the herein disclosed means, methods and uses of monitoring/predicting, the reference activity or reference expression level of KRAS, and, optionally, EGFR and/or BRAF/level of a control subject/patient can be replaced by a reference activity of KRAS, and, optionally, EGFR and/or BRAF activity or expression level from the subject/patient to be treated itself obtained prior to (or at the beginning of) the treatment/therapy. In this specific case, the “control subject/patient” would be the subject/patient to be treated itself. The efficacy of the cancer treatment would then be assessed on the basis of how the activity of KRAS, and, optionally, EGFR and/or BRAF activity or expression level of the at least one marker gene in accordance with this invention changes during treatment/therapy compared with said particular reference activity of KRAS, and, optionally, EGFR and/or BRAF activity or expression level. The more significant and/or faster said change is the more efficacious is the treatment/therapy.

[0155] As mentioned above, the efficacy of a treatment of the cancer is assessed in accordance with specific embodiments of this invention, on the basis that the activity or the expression level of KRAS, and, optionally. EGFR and/or BRAF activity or expression level of at least one marker gene as described herein is different from a certain reference activity of KRAS, and, optionally, EGFR and/or BRAF activity or expression level. Thereby, it is clear that different means higher or lower, depending on whether the cancer comes along with an up- or down-regulated activity of KRAS, and, optionally, EGFR and/or BRAF activity or expression level.

[0156] In this context, different, higher or lower means different, higher or lower than the normal (range of) activity or expression level of KRAS, and, optionally, EGFR and/or BRAF activity or expression level of said at least one marker gene. For example, different, higher or lower means at least 1.5 fold, at least 2 fold, at least 2.5 fold, at least 3 fold, at least 4 fold, at least 5 fold, at least 7 fold, at least 10 fold, at least 15 fold, at least 25 fold, at least 50 fold, at least 100 fold or at least 200 fold different, higher or lower, wherein the higher values are preferred.

[0157] If at all, in which direction (i.e. higher or lower), and to which extend the activity or expression level of KRAS, and, optionally, EGFR and/or BRAT activity or expression level of at least one marker gene as described herein differs from its corresponding reference expression level, can easily be deduced by the skilled person based on the teaching provided herein and the common general knowledge. Accordingly, it is possible to assess for each marker gene particularly described herein, whether a given difference between the reference activity or expression level of KRAS, and, optionally, EGFR and/or BRAF activity or expression level and the activity or expression level of KRAS, and, optionally, EGFR and/or BRAF activity or expression level of a subject/patient to be diagnostically assessed is diagnostic for a cancer characterized by the presence of at least one KRAS mutation or the efficacy of a treatment thereof.

[0158] As mentioned, in context of the means, methods and uses of monitoring/predicting as disclosed herein, the extent of the “difference” between the activity or expression level of KRAS, and, optionally, EGFR and/or BRAF activity or expression level in a sample or patient to be assessed or monitored in accordance with this invention and corresponding “reference activity/reference expression level” of KRAS, and, optionally, EGFR and/or BRAF “reference activity/reference expression level” is indicative for the (predicted) efficacy of the therapy/treatment of a the cancer (to be) performed.

[0159] For example, if the control subject/patient is a “responder” (e.g. a “positive control”), a minimal or low difference of the activity/expression level of KRAS, and, optionally. EGFR and/or BRAF activity or expression level between the “reference” and the sample/patient to be assessed or monitored is indicative for “high efficacy”. The same may be evaluated on the basis of a “typical/desired response”. Also here a low difference (at a certain point in time) to the “control” indicates a high efficacy. Similarly, in case that the “control subject/patient” is a non-responder (e.g. “negative control”) or a patient sample obtained before treatment, a higher difference in reference activity or reference expression level of KRAS, and, optionally, EGFR and/or BRAF reference activity or reference expression level obtained prior to/at the beginning of a therapy/treatment of a cancer characterized by the presence of at least one KRAS mutation may also be indicative for a high efficacy. In this context, a high and thereby “positive” difference (at a certain point in time) between a “non-responder sample” or an “own sample before treatment or at the beginning of the treatment” of the given patient and the sample assessed during or after treatment indicates a high efficacy.

[0160] As can be deduced from the above, the reference activity or reference expression level of KRAS, and, optionally, EGFR and/or BRAF reference activity or reference expression level as referred to herein may be taken at the day of diagnosis, once the therapy/treatment is initiated, in between and/or during therapy/treatment, either from the subject/patient to be treated itself or from a corresponding control subject/patient (healthy/responder/non-responder). The reference activity of KRAS, and, optionally, EGFR and/or BRAF reference activity or reference expression level may be determined at the same or at a different point in time than the activity of KRAS, and, optionally. EGFR and/or BRAF activity or expression level of the at least one marker gene, for example with respect to the course of the therapy/treatment.

[0161] In particular, if the reference activity or expression level of KRAS, and, optionally, EGFR and/or BRAF activity or expression level is obtained from a control subject/patient different from the subject/patient to be treated, it is preferred that the reference activity or reference expression level of KRAS, and, optionally, EGFR and/or BRAF reference activity or reference expression level is determined at the same point in time during therapy/treatment. In particular, if the reference activity or reference expression level of KRAS, and, optionally, EGFR and/or BRAF reference activity or reference expression level is obtained from the subject/patient to be treated itself, the reference activity or reference expression level of KRAS, and, optionally, EGFR and/or BRAF reference activity or reference expression level should be determined at a different point in time during therapy/treatment to allow comparison, for example, at the beginning of (or prior to) the therapy/treatment.

[0162] In general, activity or expression level of KRAS, and, optionally, EGFR and/or BRAF activity or expression level(s) described herein can be determined once or, preferably, several times. For example, activity or expression level of KRAS, and, optionally, EGFR and/or BRAF activity or expression levels can be determined on a daily, weekly, monthly or yearly basis during therapy/treatment. Commonly, the requirements of corresponding studies would be met, if the frequency of determining activity or expression level of KRAS, and, optionally, EGFR and/or BRAF activity or expression levels decreases during process of therapy/treatment. Non-limiting examples of schemes of determining activity or expression level of KRAS, and, optionally, EGFR and/or BRAF activity or expression levels in accordance with this invention are provided herein.

[0163] It is of note that the skilled person is readily in the position to elect (a) suitable control patient(s)/subject(s) and the point(s) in time when the (reference) activity or (reference) expression level of KRAS, and, optionally, EGFR and/or BRAF (reference) activity or (reference) expression levels are determined for each individual setup of the means, methods and uses provided.

[0164] In one embodiment, the present invention relates to the use of a (transgenic) cell or a (transgenic) non-human animal having at least one mutation in the KRAS gene, and, optionally, in the EGFR gene and/or the BRAF gene for screening and/or validation of a medicament for the treatment of cancer characterized by the presence of at least one mutation in the KRAS gene. The term “cell” as used in this context may also comprise a plurality of cells as well as cells comprised in a tissue. A cell to be used may, for example, be a primary tumor cell. The tumor cell or cell to be used in the screening or validation method may be obtained from samples from a (transgenic) non-human animal suffering from non-small cell lung cancer, lung adenocarcinoma, pancreatic cancer, colorectal cancer, breast cancer, leukemias, prostate cancer, lymphomas, brain tumors, pediatric tumors or sarcomas. The tumor cell or cell may also be obtained from patient samples (e.g. biopsies), in particular a biopsy/biopsies from a patient/subject suffering from non-small cell lung cancer, lung adenocarcinoma, pancreatic cancer, colorectal cancer, breast cancer, leukemias, prostate cancer, lymphomas, brain tumors, pediatric tumors or sarcomas. Accordingly, the tumor cell or cell may be a human tumor cell or cell. Again, such a cell to be used in the present screening or validation methods may be comprised in a tissue or tissue sample, like in a sample biopsy.

[0165] The used non-human animal or cell may be transgenic or non transgenic. “Transgenic” in this context particularly means that at least one of the marker gene as described or defined herein is over- or under-expressed. For example, if an HSP90-inhibitor is to be screened and/or validated, it is preferred that such marker genes are over-expressed, the activity or expression level of KRAS, and, optionally. EGFR and/or BRAF activity or expression level of which is enhanced when the activity or expression level of KRAS, and, optionally, EGFR and/or BRAF activity or expression level is enhanced and/or that such marker genes are under-expressed, the activity or expression level of KRAS, and, optionally, EGFR and/or BRAF activity or expression level of which is decreased when the activity or expression level of KRAS, and, optionally. EGFR and/or BRAF activity or expression level is enhanced.

[0166] “Transgenic” in this context may also mean that KRAS is over- or under-expressed, and/or that the KRAS-activity in the transgenic non-human animal or a transgenic cell is enhanced or decreased. A preferred (transgenic) non-human animal or (transgenic) cell in context of the invention suffers from a cancer characterized by the presence of a mutation in the KRAS gene, particularly from such cancer for the treatment of which the medicament is to be screened and/or validated. For example, if a medicament for non-small lung cancer is to be screened and/or validated, the (transgenic) non-human animal or (transgenic) cell is particularly intended to suffer from non-small lung cancer. i.e. to have, for example, an increased KRAS activity and/or increased expression level.

[0167] The term “transgenic non-human animal” or “transgenic cell” as used herein refers to an non-human animal or cell, not being a human, that comprises genetic material different from the genetic material of a corresponding wild-type animal/cell. “Genetic material” in this context may be any kind of a nucleic acid molecule, or analogues thereof, for example a nucleic acid molecule, or analogues thereof as defined herein. “Different” in this context means additional or fewer genetic material with respect to the genome of the wild-type animal/cell and/or rearranged genetic material, i.e. genetic material present at a different locus of the genome with respect to the genome of the wild-type animal/cell. An overview of examples of different expression systems to be used for generating transgenic cell/animal is, for instance, contained in Methods in Enzymology 153 (1987), 385-516, in Bitter et al. (Methods in Enzymology 153 (1987), 516-544) and in Sawers et al. (Applied Microbiology and Biotechnology 46 (1996). 1-9). Billman-Jacobe (Current Opinion in Biotechnology 7 (1996), 500-4), Hockney (Trends in Biotechnology 12 (1994), 456-463), Griffiths et al., (Methods in Molecular Biology 75 (1997), 427-440).

[0168] In a preferred embodiment, the (transgenic) non-human animal or (transgenic) cell is or is derived from a mammal. Non-limiting examples of the (transgenic) non-human animal or derived (transgenic) cell are selected from the group consisting of a mouse, a rat, a rabbit, a guinea pig and a Drosophila.

[0169] Preferably, the (transgenic) cell in accordance with this invention may be an animal cell, for example, a non-human animal cell. However, also human cells are envisaged to be employed as cells in context of the present invention. In a non limiting example, such cell may be an embryonic stem cell (ES cell), particularly a non-human animal ES, like, for example, a mouse or rat ES cell. The (transgenic) cell as described herein, particularly the ES cell, may also be used for generating the (transgenic) non-human animal as described herein. The ES cell technology for generating transgenic animals is well known in the art and for example is described in Pirity (Methods Cell Biol, 1998, 57:279).

[0170] Generally, the (transgenic) cell may be a prokaryotic or eukaryotic cell. For example, the (transgenic) cell may be a bacterial, yeast, fungus, plant or animal cell. In general, the transformation or genetically engineering of a cell with a nucleic acid construct or vector can be carried out by standard methods, as for instance described in Sambrook and Russell (2001), Molecular Cloning: A Laboratory Manual, CSH Press, Cold Spring Harbor, N.Y., USA; Methods in Yeast Genetics, A Laboratory Course Manual, Cold Spring Harbor Laboratory Press, 1990.

[0171] The (transgenic) non-human animal or (transgenic) cell as described or defined in context of this invention is particularly useful in methods for screening and/or validation of a medicament for the treatment of cancers as defined and described herein.

[0172] These screening methods may, in particular, performed in vivo using, for example, (transgenic) animals as described herein (e.g. rats, mice and the like) and/or animals comprising (a) cell(s), (a) tissue(s) or (a) cell culture(s) characterized by at least one mutation in the KRAS gene and, optionally, in the EGFR and/or the BRAF gene. Said (a) cell(s), (a) tissue(s) or (a) cell culture(s) may, for example, be obtained/derived from (a) tumor cell(s)/tumor(s) characterized by at least one mutation in the KRAS gene and, optionally, in the EGFR and/or the BRAF gene. In particular, said (a) cell(s), (a) tissue(s) or (a) cell culture(s) may be obtained from a subject/patient suffering from a cancer characterized by at least one mutation in the KRAS gene and, optionally, in the EGFR and/or the BRAF gene. Exemplary cancers described herein are, inter alia, non-small lung cancer, pancreatic cancer, colorectal cancer, breast cancer and leukemia. These in vivo screening methods may in particular comprise measuring and determining differences in tumor volume, for example, in the (transgenic) animals described herein above.

[0173] Accordingly, the present invention also relates to such a method for screening and/or validation of a medicament for the treatment of a cancer. Said method comprising the steps of

a) administering to a (transgenic) non-human animal or (transgenic) cell as defined herein said medicament to be screened/validated;
b) determining in (a sample from) said animal or cell the activity or expression level of KRAS, and, optionally, EGFR and/or BRAF activity or expression level in accordance with this invention;
c) comparing the activity or expression level determined in h) with a reference activity or reference expression level of KRAS, and, optionally, EGFR and/or BRAF activity or expression level, determined in (a sample from) a control (transgenic) non-human animal or (transgenic) cell as defined herein to which said medicament to be screened has not been administered; and
d) selecting said medicament when said activity or expression level or activity of KRAS, and, optionally, EGFR, and/or BRAF activity or expression level determined in b) differs from said reference expression level or reference activity determined in c).

[0174] The corresponding definitions and descriptions provided above, for example with respect to “marker gene”, “therapy/treatment”, “efficacy”, “cancer characterized by the presence of at least one mutation in the KRAS gene” or “susceptibility” thereto, “(control) subject/patient”, “(transgenic) non-human anima or “(transgenic) cell”, “expression level”, “reference expression level” etc., apply here, mutatis mutandis. Particularly the relevant definitions and descriptions provided above with respect to “control subject/patient” also apply to the “control (transgenic) non-human animal” or “(transgenic) cell”, mutatis mutandis.

[0175] In context of this invention, “screening and/or validation of medicaments” means, on the one hand, whether a given set of compounds comprises one or more compound(s) that can function as (a) medicament(s), and/or, on the other hand, whether (a) given compounds) can function as (a) medicament(s). It is particularly intended that the medicaments to be screened and/or validated in context of this invention are medicaments for the treatment, prevention and/or amelioration of a cancer as defined herein.

[0176] The skilled person is readily in the position to put this embodiment of the present invention into practice. For example, by doing so, the compound(s)/medicament(s) to be screened and/or validated may be administered to the non-human (transgenic) animal or cell described herein, and, afterwards (for example after a certain period of time sufficient to allow a compound to effect on a cancer as described herein), it is analyzed whether the cancer, or a symptom thereof, of said animal/cell is ameliorated.

[0177] The present invention also relates to a kit for carrying out the methods or uses of this invention. In a preferred embodiment, said kit useful for carrying out the methods and uses described herein comprises oligonucleotides or polynucleotides capable of determining the presence of at least one mutation in the KRAS gene, and, optionally, the EGFR, and/or the BRAF gene.

[0178] For example, said kit may comprise (a) compound(s) required for specifically determining the activity or expression level of KRAS, and, optionally, of EGFR and/or of BRAF activity or expression level as defined herein. Moreover, the present invention also relates to the use of (a) compound(s) required for specifically determining the activity or expression level of KRAS, and, optionally, EGFR and/or BRAF activity or expression level as defined herein for the preparation of a kit for carrying out the methods or uses of this invention. On the basis of the teaching of this invention, the skilled person knows which compound(s) is (are) required for specifically determining the activity of KRAS, and, optionally, of EGFR and/or of BRAF activity or expression level as defined herein. For example, such compound(s) may be (a) “binding molecule(s)”, like, for example, (a) “binding molecule(s)” as defined herein-above. Particularly, such compounds) may be (a) (nucleotide) probe(s), (a) primer(s) (pair(s)), (an) antibody(ies) and/or (an) aptamer(s) specific for at least one marker gene as described herein or for a product thereof. In a preferred embodiment, the kit (to be prepared in context) of this invention is a diagnostic kit.

[0179] In a particularly preferred embodiment of the present invention, the kit (to be prepared in context) of this invention or the methods and uses of the invention may further comprise or be provided with (an) instruction manual(s). For example, said instruction manual(s) may guide the skilled person (how) to determine the (reference) activity or (reference) expression level of KRAS, and, optionally, of EGFR and/or of BRAF, i.e. (how) to diagnose the cancer described herein or a susceptibility thereto, (how) to monitor the efficacy of a treatment of said cancer or a susceptibility thereto or (how) to predict the efficacy of a treatment of said cancer or a susceptibility thereto in accordance with the present invention. Particularly, said instruction manual(s) may comprise guidance to use or apply the herein provided methods or uses.

[0180] The kit (to be prepared in context) of this invention may further comprise substances/chemicals and/or equipment suitable/required for carrying out the methods and uses of this invention. For example, such substances/chemicals and/or equipment are solvents, diluents and/or buffers for stabilizing and/or storing (a) compound(s) required for specifically determining the activity or expression level of KRAS, and, optionally, EGFR and/or BRAF activity or expression level.

[0181] In one embodiment the present invention relates to the use of an HSP90 inhibitor as defined herein above for the preparation of a pharmaceutical composition for the treatment, amelioration and/or prevention of treatment of cancer characterized by the presence of at least one activating mutation in the KRAS gene. Alternatively, the present invention may relate to an HSP90 inhibitor as defined herein for use in treating, ameliorating and/or preventing cancer characterized by the presence of at least one activating mutation in the KRAS gene. Accordingly, the present invention relates to a method for preventing, treating or ameliorating a cancer characterized by the presence of at least one activating mutation in the KRAS gene comprising the administration of an effective amount of the HSP90 inhibitor as defined herein above to a subject in need of such a prevention, treatment or amelioration. Preferably, the subject in need of such a prevention, treatment or amelioration is a human.

[0182] The pharmaceutical composition will be formulated and dosed in a fashion consistent with good medical practice, taking into account the clinical condition of the individual patient, the site of delivery of the pharmaceutical composition, the method of administration, the scheduling of administration, and other factors known to practitioners. The “effective amount” of the pharmaceutical composition for purposes herein is thus determined by such considerations.

[0183] The skilled person knows that the effective amount of pharmaceutical composition administered to an individual will, inter alia, depend on the nature of the compound. For example, if said compound is a HSP90 inhibitor as described herein above the total pharmaceutically effective amount of pharmaceutical composition administered parenterally per dose will be in the range of about 1 μg HSP90 inhibitor/kg/day to 10 mg HSP90 inhibitor/kg/day of patient body weight, although, as noted above, this will be subject to therapeutic discretion. More preferably, this dose is at least 0.01 mg HSP90 inhibitor/kg/day and most preferably for humans between about 0.01 and 10 mg HSP90 inhibitor/kg/day. If given continuously, the pharmaceutical composition is typically administered at a dose rate of about 1 μg/kg/hour to about 50 μg/kg/hour, either by 1-4 injections per day or by continuous subcutaneous infusions, for example, using a mini-pump. An intravenous bag solution may also be employed. The length of treatment needed to observe changes and the interval following treatment for responses to occur appears to vary depending on the desired effect. The particular amounts may be determined by conventional tests which are well known to the person skilled in the art.

[0184] Pharmaceutical compositions of the invention may be administered orally, rectally, parenterally, intracisternally, intravaginally, intraperitoneally, topically (as by powders, ointments, drops or transdermal patch), bucally, or as an oral or nasal spray.

[0185] Pharmaceutical compositions of the invention preferably comprise a pharmaceutically acceptable carrier. By “pharmaceutically acceptable carrier” is meant a non-toxic solid, semisolid or liquid filler, diluent, encapsulating material or formulation auxiliary of any type. The term “parenteral” as used herein refers to modes of administration which include intravenous, intramuscular, intraperitoneal, intrasternal, subcutaneous and intraarticular injection and infusion.

[0186] The pharmaceutical composition is also suitably administered by sustained release systems. Suitable examples of sustained-release compositions include semi-permeable polymer matrices in the form of shaped articles, e.g., films, or microcapsules, Sustained-release matrices include polylactides (U.S. Pat. No. 3,773,919, EP 58,481), copolymers of L-glutamic acid and gamma-ethyl-L-glutamate (Sidman, U. et al., Biopolymers 22:547-556 (1983)), poly (2-hydroxyethyl methacrylate) (R. Langer et al., J. Biomed. Mater. Res. 15:167-277 (1981), and R. Langer, Chem. Tech. 12:98-105 (1982)), ethylene vinyl acetate (R. Langer et al., Id.) or poly-D-(−)-3-hydroxybutyric acid (EP 133,988). Sustained release pharmaceutical composition also include liposomally entrapped compound. Liposomes containing the pharmaceutical composition are prepared by methods known per se: DE 3.218.121; Epstein et al., Proc. Natl. Acad. Sci. (USA) 82:3688-3692 (1985); Hwang et al., Proc. Natl. Acad. Sci. (USA) 77:4030-4034 (1980); EP 52,322; EP 36,676; EP 88,046; EP 143,949; EP 142,641; Japanese Pat. Appl. 83-118008; U.S. Pat. Nos. 4,485,045 and 4,544,545; and EP 102,324. Ordinarily, the liposomes are of the small (about 200-800 Angstroms) unilamellar type in which the lipid content is greater than about 30 mol. percent cholesterol, the selected proportion being adjusted for the optimal therapy.

[0187] For parenteral administration, the pharmaceutical composition is formulated generally by mixing it at the desired degree of purity, in a unit dosage injectable form (solution, suspension, or emulsion), with a pharmaceutically acceptable carrier, i.e., one that is non-toxic to recipients at the dosages and concentrations employed and is compatible with other ingredients of the formulation.

[0188] Generally, the formulations are prepared by contacting the components of the pharmaceutical composition uniformly and intimately with liquid carriers or finely divided solid carriers or both. Then, if necessary, the product is shaped into the desired formulation. Preferably the carrier is a parenteral carrier, more preferably a solution that is isotonic with the blood of the recipient. Examples of such carrier vehicles include water, saline, Ringer's solution, and dextrose solution. Non aqueous vehicles such as fixed oils and ethyl oleate are also useful herein, as well as liposomes. The carrier suitably contains minor amounts of additives such as substances that enhance isotonicity and chemical stability. Such materials are non-toxic to recipients at the dosages and concentrations employed, and include buffers such as phosphate, citrate, succinate, acetic acid, and other organic acids or their salts; antioxidants such as ascorbic acid; low molecular weight (less than about ten residues) (poly)peptides, e.g., polyarginine or tripeptides; proteins, such as serum albumin, gelatin, or immunoglobulins; hydrophilic polymers such as polyvinylpyrrolidone; amino acids, such as glycine, glutamic acid, aspartic acid, or arginine; monosaccharides, disaccharides, and other carbohydrates including cellulose or its derivatives, glucose, manose, or dextrins; chelating agents such as EDTA; sugar alcohols such as mannitol or sorbitol; counterions such as sodium; and/or nonionic surfactants such as polysorbates, poloxamers, or PEG.

[0189] The components of the pharmaceutical composition to be used for therapeutic administration must be sterile. Sterility is readily accomplished by filtration through sterile filtration membranes (e.g. 0.2 micron membranes). Therapeutic components of the pharmaceutical composition generally are placed into a container having a sterile access port, for example, an intravenous solution hag or vial having a stopper pierceable by a hypodermic injection needle.

[0190] The components of the pharmaceutical composition ordinarily will be stored in unit or multi-dose containers, for example, sealed ampoules or vials, as an aqueous solution or as a lyophilized formulation for reconstitution. As an example of a lyophilized formulation, 10-ml vials are filled with 5 ml of sterile-filtered 1% (w/v) aqueous solution, and the resulting mixture is lyophilized. The infusion solution is prepared by reconstituting the lyophilized compound(s) using bacteriostatic Water-for-Injection.

[0191] The present invention also relates to a combination of cell lines selected from the group consisting of A427, A549, Calu-1, Calu-3, Calu-6, H1299, H1355, H1395. H1437, H1563, H1568, H1648, H1650, H1666, H1734, H1755, H1770, H1781, H1792, H1819, H1838, H1915, H1944, H1975, H1993, H2009, H2030, H2052, H2087, H2110, H2122, H2126, H2172, H2228, H23, H2347, H2444, H28, H358, H441, H460, H520, H522, H596, H647, H661, H820, HCC2935, HCC4006, HCC827, SK-LU-1, EKVX, H322M, HOP-62, HOP-92, Colo699, DV-90, HCC15, HCC366, HCC44, HCC78, LCLC103H, LCLC97TM1 and LouNH91.

[0192] These combinations of cell lines should comprise at least 3, 4, 5, 6, 7, 8, 9, 10, 11, 12, 13, 14, 15, 20, 25, 30, 35, 40, 45, 50, 55 or 60 of the cell lines as provided herein above. In particular the combination of cell lines should comprise at least 60 cell lines as provided herein above. These cell lines, and in particular their combination are particular useful as model systems for the assessment of any potential drug susceptibility. This usefulness of these specifically selected cell lines (in combination) for the assessment of drug susceptibility is demonstrated in the appended example. All of the mentioned cell lines are available to the person skilled in the art and the public from cell depositary institutions, in particular ATCC or DMSZ as illustrated in FIG. 19 where also corresponding accession numbers for these cells are provided.

[0193] Also the use of the combination of cell lines as defined herein above for predicting susceptibility to a drug, in particular, an HSP90 inhibitor, is disclosed herein. The combination of cell lines may be useful for predicting the susceptibility to a drug, in particular to an HSP90 inhibitor or responsiveness of a (mammalian) tumor cell to treatment with a drug, in particular an HSP90 inhibitor. It may also be useful in predicting whether a patient is likely to respond to or is sensitive to a drug, in particular an HSP90 inhibitor. Corresponding means and methods for predicting susceptibility/responsiveness and the like are well known in the art and also described herein above. Accordingly, a skilled person will know how to use such a combination of cell lines in this context.

[0194] The present invention is further described by reference to the following non-limiting figures and examples.

[0195] In summary, the present invention relates to the following items described herein in detail and also reflected in the appended claims:

1. A method of selecting (a) cell(s), (a) tissue(s) or (a) cell culture(s) with susceptibility to an HSP90 inhibitor, comprising the steps:
[0196] (a) determining the presence of at least one activating mutation in the KRAS gene in said cell, tissue or cell culture; and
[0197] (b) selecting (a) cell(s), tissue(s) or cell culture(s) with at least one activating mutation in the KRAS gene.
   2. The method of item 1, further comprising the steps
[0198] (i) contacting said cell(s), tissue(s) or cell culture(s) with an HSP90 inhibitor; and
[0199] (ii) evaluating viability of said cell(s), tissue(s) or cell culture(s) contacted with an HSP90 inhibitor.
   3. A method for determining the responsiveness of a mammalian tumor cell or cancer cell to treatment with an HSP90 inhibitor, said method comprising determining the presence of at least one activating mutation in the KRAS gene in said tumor cell, wherein said activating mutation is indicative of whether the cell is likely to respond or is responsive to the treatment.
   4. The method of any one of items 1 to 3, whereby additionally and/or optionally also an activating mutation in the EGFR and/or the BRAF gene is determined.
   5. In vitro method for the identification of a responder for or a patient sensitive to an HSP90 inhibitor, said method comprising the following steps:
[0200] (a) obtaining a sample from a patient suspected to suffer from or being prone to suffer from a cancer characterized by the presence of at least one activating mutation in the KRAS gene, and, optionally, in the EGFR and/or the BRAF gene; and
[0201] (b) evaluating the presence of at least one activating mutation in the KRAS gene, and, optionally, the EGFR and/or the BRAF gene;
[0202] whereby an activating mutation in the KRAS gene alone or in addition to an activating mutation in the EGFR and/or the BRAF gene is indicative for a responding patient or is indicative for a sensitivity of said patient to an HSP90 inhibitor.
   6. The method of any one of items 1 to 5, wherein said HSP90 inhibitor is geldanamycin or a derivative thereof.
   7. The method of item 6, wherein said geldanamycin derivative is 17-AAG or IPI-504.
   8. The method of any one of items 1 to 5, wherein said HSP90 inhibitor is NVP-AUY922.
   9. The method of any one of items 1 to 8, wherein said mutation in the KRAS gene is selected from the group consisting of KRAS_G12C, KRAS_G12R, KRAS_G12D, KRAS_G12A, KRAS_G12S. KRAS_G12V, KRAS_G13D. KRAS_G13S. KRAS_G13C, KRAS_G13V, KRAS_Q61H, KRAS_Q61R, KRAS_Q61P, KRAS_Q61L, KRAS_Q61K, KRAS_Q61E, KRAS_A59T and KRAS_G12F.
   10. The method of any one of items 4 to 9, wherein said mutation in the EGFR gene is selected from the group consisting of EGFR_D770_N771>AGG; EGFR_D770_N771insG; EGFR_D770N771insG; EGFR_D770N771insN; EGFR_E709A; EGFR_E709G; EGFR_E709H; EGFR_E709K: EGFR_E709V; EGFR_E746 A750del: EGFR_E746 A750del; T751A; EGFR_E746 A750del, V ins; EGFR_E746 T751del, I ins; EGFR_E746 T751del, S752A; EGFR_E746 T751del, S752D; EGFR_E746T751del, V ins; EGFR_G719A; EGFR_G719C: EGFR_G719S; EGFR_H773V774insH; EGFR_H773_V774insNPH; EGFR_F1773_V774insPH; EGFR_H773>NPY; EGFR_L747_E749del; EGFR_L747_E749del, A750P; EGFR_L747 S752del; EGFR_L747_S752del, P753S; EGFR_L747_S752del, Q ins; EGFR_L747_T750del, P ins; EGFR_L747_T751del; EGFR_L858R; EGFR_L861Q; EGFR_M766_A767insAI; EGFR_P772_H773insV; EGFR_S752_I759del; EGFR_S768I; EGFR_T790M; EGFR_V769_D770insASV: EGFR_V769_D770insASV; and EGFR_V774_C775insHV.
   11. The method of any one of items 4 to 10, wherein said mutation in the BRAF gene is selected from the group consisting of BRAF_BRAF_D594V, BRAF_F468C, BRAF_F595L, BRAF_G464E, BRAF_G464R, BRAF_G464V, BRAF_G466A, BRAF_G466E, BRAF_G466R, BRAF_G466V, BRAF_G469A, BRAF_G469E, BRAF_G469R, BRAF_G469R, BRAF_G469S, BRAF_G469V, BRAF_G596R, BRAF_K601E, BRAF_K601N, BRAF_L597Q, BRAF_L597R, BRAF_L597S, BRAF_L597V, BRAF_T599I, BRAF_V600E, BRAF_V600K, BRAF_V600L, and BRAF_V600R
   12. The method of any one of items 4 to 11, wherein said mutation in the KRAS gene, the EGFR and/or the BRAF gene is detected by SSP, PCR-RFLP assay, real-time PCR, sequencing, HPLC or mass-spectrometric genotyping.
   13. The method of any one of items 5 to 12, wherein said sample is obtained from a patient suspected to suffer from or being prone to suffer from cancer.
   14. Use of an oligo- or polynucleotide capable of detecting (an) activating mutation(s) of at least one activating mutation in the KRAS gene and, optionally in the EGFR and/or in the BRAF gene for diagnosing sensitivity to an HSP90 inhibitor as defined in any one of items 6 to 8.
   15. The use of item 14, wherein said oligonucleotide is about 15 to 100 nucleotides in length.
   16. A method of monitoring the efficacy of a treatment of a cancer characterized by the presence of at least one activating mutation in the KRAS gene, and, optionally, in the EGFR and/or the BRAF gene in a subject/patient suffering from said disorder or being prone to suffering from said disorder comprising the steps:
[0203] a) determining in a cell or tissue sample obtained from said subject/patient the expression or activity of KRAS, and, optionally the activity or expression level of EGFR and/or the activity or expression level of BRAF; and
[0204] b) comparing the activity of said at least one marker gene determined in a) with a reference or control expression level or reference or control activity of KRAS, and, optionally with a reference or control expression level of EGFR and/or with a reference or control expression level of BRAF,
[0205] wherein the extent of the difference between said activity or expression level determined in a) and said reference expression level or reference activity is indicative for said efficacy of a treatment of said cancer.
   17. A method of predicting the efficacy of a treatment of a cancer characterized by the presence of at least one activating mutation in the KRAS gene, and, optionally, in the EGFR and/or the BRAF gene for a subject/patient suffering from said disorder or being prone to suffering from said disorder comprising the steps:
[0206] a) determining in a cell or tissue sample obtained from said subject/patient the activity or expression level of at least one marker gene selected from the group consisting of KRAS. EGFR and/or BRAF; and
[0207] b) comparing the activity of said at least one marker gene determined in a) with a reference activity or reference expression level of said at least one marker gene, optionally determined in a cell or tissue sample obtained from a control subject/patient (responder and/or non-responder),
[0208] wherein the extent of the difference between said activity or expression level determined in a) and said reference or control activity or said reference or control expression level is indicative for the predicted efficacy of a treatment of cancer.
   18. The method of item 16 or 17, wherein said treatment of cancer characterized by the presence of at least one activating mutation in the KRAS gene, and, optionally, in the EGFR and/or the BRAF gene comprises the administration of an HSP90 inhibitor as defined in any one of items 6 to 8.
   19. Use of a (transgenic) cell or a (transgenic) non-human animal having at least one activating mutation in the KRAS gene, and, optionally, in the EGFR and/or the BRAF gene for screening and/or validation of a medicament for the treatment of cancer characterized by the presence of at least one activating mutation in the KRAS gene.
   20. The method of any of items 5 to 19, wherein said cancer is selected from the group consisting of non-small cell lung cancer, lung adenocarcinoma, pancreatic cancer, colorectal cancer, breast cancer, head and neck cancer, ovarian cancer, endometrial cancer, gastrointestinal cancer (including gastric and esophageal cancer), renal cell cancer, urinary tract carcinomas, leukemias, prostate cancer, lymphomas, melanomas, brain tumors, pediatric tumors and sarcomas.
   21. A kit useful for carrying out the method of any one of items of 1 to 12, 16, 17 and 20, comprising oligonucleotides or polynucleotides capable of determining the presence of at least one activating mutation in the KRAS gene, and, optionally, the EGFR gene and/or the BRAF gene.
   22. Use of an HSP90 inhibitor as defined in any one of items 6 to 8 for the preparation of a pharmaceutical composition for the treatment, amelioration and/or prevention of treatment of cancer characterized by the presence of at least one activating mutation in the KRAS gene.
   23. An HSP90 inhibitor as defined in any one of items 6 to 8 for use in treating, ameliorating and/or preventing cancer characterized by the presence of at least one activating mutation in the KRAS gene.
   24. A combination of cell lines selected from the group consisting of A427, A549, Calu-1, Calu-3, Calu-6, H1299, H1355, H1395, H1437, H1563, H1568, H1648, H1650, H1666, H1734, H1755, H1770, H1781, H1792, H1819, H1838, H1915, H1944, H1975, H1993, H2009, H2030, H2052, H2087, H2110, H2122, H2126, H2172, H2228, H23, H2347, H2444, H28, H358, H441, H460, H520, H522, H596, H647, H661, H820, HCC2935, HCC4006, HCC827, SK-LU-1, EKVX, H322M, HOP-62. HOP-92, Colo699, DV-90, HCC15, HCC366, HCC44, HCC78, LCLC103H. LCLC97TM1 and LouNH91.
   25. Use of the combination of cell lines as defined in item 24 for predicting susceptibility to a drug.
   26. The use of item 25, wherein said drug is an HSP90 inhibitor.

[0209] The Figures show:

[0210] FIG. 1. The NSCLC Cell Line Collection

[0211] Overview over the NSCLC cell line collection used in the study including providers and morphopathological details.

[0212] FIG. 2. Significant Lesions in Lung Cancer

[0213] Summary of regions with significant copy number alterations as defined by GISTIC in the cell line panel and a primary lung cancer panel.

[0214] FIG. 3. Genomic Validation of 84 NSCLC Cell Lines

[0215] (A) Chromosomal copy number changes of NSCLC cell lines are plotted against those of 371 primary NSCLC tumors. The q-values of the false discovery rates for each alteration (x-axis) are plotted at each genome position (y-axis). FIG. 3A1, chromosomal losses (cell lines, grey; primary tumors, black); FIG. 3A2 right panel, chromosomal gains (cell lines, greycurves; primary tumors, blackcurves). Genomic positions corresponding to even-numbered chromosomes are shaded; dotted lines indicate centromeres; light grey line, q-value cutoff (0.25) for significance. Genes marked in bold represent known targets of mutation in lung adenocarcinoma. Putative targets near peaks are given in parentheses. Genes identified by GISTIC using stringent filtering criteria for peak border detection are marked by asterisks. (B) Oncogene mutations present in NSCLC cell lines (black bars) are plotted according to their relative frequencies in comparison to primary lung tumors (empty bars) (Aviel-Ronen et al., 2006; Bamford et al., 2004; Sharma et al., 2007; Thomas et al., 2007). (C) Hierarchical clustering of significant lesions defined by GISTIC and oncogene mutations using the reciprocal co-occurance ratio as distance measure and average linkage of clusters. The distance of the clusters is reflected in the length of the branches. Note that mutations in EGFR and KRAS occur in a mutually exclusive fashion, while EGFR mutation and amplification are found in the same cluster. (D) Transcriptional profiles from renal primary tissue (grey) and cell lines (black); lung cancer primary tissue (dark grey) and cell lines (light black); lymphoma primary tissue (light black) and lymphoma cell lines (light grey) were analyzed by hierarchical clustering. To reduce noise, probesets were filtered prior to clustering (Coefficient of variation from 1.0-10.0, present call rate 20%; absolute expression >100 in >20% of samples).

[0216] FIG. 4. Profiles of Aberrations in Glioma, Melanoma and Lung Cancer

[0217] (A) Chromosomal copy number changes of NSCLC cell lines are plotted against those of primary gliomas. Two separate figures are given for deletions (left panel, NSCLC cell lines in black, gliomas in grey) and amplifications (right panel. NSCLC cell lines in light black, gliomas in dark grey). (B) Chromosomal copy number changes of NSCLC cell lines are plotted against those of primary melanomas (NSCLC cell lines in red respectively blue as above, melanoma short term cultures in purple). (C) Genomic similarity was analyzed by computing correlations of GISTIC q-values for each SNP between NSCLC cell lines and the indicated cancer entity primary lung cancer, ovarian cancer, glioma, melanoma cell culture samples, normal tissues and a randomly split subset of NSCLC cell lines.

[0218] FIG. 5. Robustness of Phenotypic Properties of Mutated EGFR Lung Cancer Cells In Vivo

[0219] (A) EGFR mutations induce substantial changes in gene expression as measured by principal component analysis. The first two principal components clearly distinguish cell lines with mutated (mt) EGFR (white squares) and wildtype EGFR (wt) (black dots) (PC; total 54; cumulative variance of first 2 principal components=24.1: %; log₁₀|eigenvector| is given). (B) The signature of EGFR-mutated cell lines (Fold change >2; absolute difference >FC2; 100, p<0.01) was used for hierarchical clustering of 123 primary adenocarcinomas (Bhattacharjee et al., 2001) annotated for the presence (EGFR mt) or absence (EGFR wt) of EGFR mutations. All EGFR-mutant samples were grouped within one cluster. (C) All 123 primary adenocarcinomas with known EGFR mutation status were grouped using RNA transcripts identified in the cell line panel to be differentially expressed between EGFR mutated (mt) and EGFR wildtype (wt) cell lines. EGFR mutant tumors were excluded from survival analyses. (D) The association between presence (amplification, green; mutation, red: deletion, yellow) of genetic lesions to erlotinib sensitivity was analyzed by a t-test and Fisher's exact test. Only EGFR mutations and amplifications can be considered statistically significant if common methods of p-value adjustment are applied (data not shown).

[0220] FIG. 6. Phenotypic Properties of Primary Tumors are Conserved in Erlotinib-Sensitive Lung Cancer Cells.

[0221] (A) Hierarchical clustering of primary lung adenocarcinomas was performed using genes identified as being differentially expressed in erlotinib-sensitive versus erlotinib-resistant NSCLC cell lines. Whitebars represent EGFR-mutant tumors. (B) The EGFR mutation signature published by Choi et al. PLoS ONE 2: e1226 (2007) was used to perform hierarchical clustering of primary lung adenocarcinomas. Red bars represent EGFR-mutant tumors.

[0222] FIG. 7. Raw Sensitivity Data for Screened Compounds

[0223] Overview over the half maximal inhibitory concentrations (IC₅₀ values; [μM]) derived form high-throughput cell line based screening and analysis of the respective preimage under the kill curve for each cell line and each compound.

[0224] FIG. 8. Multi-Lesion Predictors of Sensitivity

[0225] Multi-lesion predictors of sensitivity tested with the KNN method. Fisher's exact test and t-test are displayed. Only significant predictors are displayed for two different GLAD thresholds.

[0226] FIG. 9. Characterization of Compounds Used in the Screen

[0227] Displayed are the chemical structures, the development phase and the main known targets for all compounds used in the screening experiments

[0228] FIG. 10. Sensitivity Profiles of Compounds Determined by High-Throughput Cell Line Screening

[0229] The half-maximal inhibitory concentrations (y-axis; IC₅₀ values) for 11 compounds are shown for the entire collection of NSCLC cell lines (individual cell lines, x-axis). Due to the fact that rapamycin typically fails to completely abrogate cellular proliferation (O'Reilly et al., 2006), the 25%-inhibitory concentration is shown for this compound. Bars represent IC₅₀ respectively IC₂₅ values (y-axis) throughout the cell line collection (x-axis) ranked according to sensitivity. The maximum concentration is assigned to the IC₅₀ resp. IC₂₅ value (10 μM for 17-AAG, erlotinib, vandetanib, sunitinib and PD168393, 30 μM for SU-11274 and dasatinib, 60 μM for VX-680, 90 μM for purvalanol and UO126) for resistant cell lines.

[0230] FIG. 11. Hierarchical Clustering of Compound Activity Uncovers Mutated EGFR as a Target for Dasatinib Activity.

[0231] (A) Displayed are the IC₅₀ values (red—high compound activity; white—low compound activity) after logarithmic transformation and normalization with the mean of the respective profile for all compounds (x-axis) and all cell lines (y-axis). The presence (black dot) of absence (grey dot) of relevant lesions is annotated in the right panel. EGFR inhibitors form a distinct subcluster, where EGFR-mutated samples show the highest degree of sensitivity. (B) Correlation coefficients (r²; red—high correlation; white—low correlation) of the IC₅₀ values after logarithmic transformation versus chromosomal gain (amp) and loss (del) as well as oncogene mutations (mut); copy numbers changes in regions defined by GISTIC were dichotomized and merged together with the binary mutation data. Putative target genes inside (#) and bordering (*) the region defined by GISTIC are annotated. Again, EGFR inhibitors are grouped in a separate cluster. (C) upper panel: Crystallographically determined binding mode of erlotinib (grey sticks) to wild-type EGFR. Dasatinib represented as white to dark grey ballandsticks is modeled into the ATP binding site of EGFR. lower panel: The T790M mutation at the gatekeeper position of the ATP pocket, associated with secondary EGFR-inhibitor resistance in patients displaces both erlotinib and dasatinib from the ATP binding pocket of the kinase domain. (D) Upper panel: Ba/F3 cells expressing mutant (del Ex19 or Ex19/T790M) EGFR were treated for 12 h with the indicated concentrations of either dasatinib or erlotinib and whole-cell lysates were immunoblotted for phospho-EGFR and EGFR. Lower panel: Dose-dependent growth inhibition after 96 h treatment with either dasatinib or erlotinib was assessed measuring cellular ATP content.

[0232] FIG. 12. Mutated EGFR as a Target for Vandetanib Activity.

[0233] (A) left panel: Vandetanib represented as ballandsticks is modeled into the ATP binding site of EGFR based on its crystallographically determined binding mode with the RET kinase. right panel: The T790M mutation at the gatekeeper position of the ATP pocket, associated with secondary EGFR-inhibitor resistance in patients displaces the drug front the ATP-binding pocket. The crystographically determined binding mode of erlotinib asballandsticks is shown in both panels as an overlay for reference. (B) Ba/F3 cells expressing mutant (del Ex1.9 or Ex191T790M) EGFR were treated for 12 h with the indicated concentrations of either vandetanib or erlotinib and whole-cell lysates were immunoblotted for phospho-EGFR and EGFR. (C) Dose-dependent growth inhibition after 96 h treatment with either dasatinib or erlotinib was assessed measuring cellular ATP content.

[0234] FIG. 13. Lesion-Based Prediction for Activity of 17-AAG, UO126 and Dasatinib.

[0235] (A) Distribution of KRAS mutations (black columns) across the 17-AAG-sensitivity profile (IC₅₀ values) in the NSCLC cell line collection and the NCI-60 cell line panel. Incidence of KRAS mutation and sensitivity towards 17-AAG is represented by a Fisher's exact test for both datasets. (B) Lysates of a KRAS wildtype (wt) and a KRAS mutated (G12C) cell line treated with 17AAG at different concentrations were immunoblotted for c-RAF, KRAS, cyclinD1 and Akt. (C) Distribution of copy number gain at 1q21.3 (black columns) across the UO126-sensitivity profile (IC₅₀ values) in the NSCLC cell line collection and the hypothemycin-sensitivity profile in the NCI-60 cell line panel. Incidence of amplification of 1q21.3 mutation and sensitivity towards 17-AAG is represented by a Fisher's exact test for both datasets. (D) Cell lines were sorted according to their sensitivity to dasatinib (IC50<1 μM; light grey). Strikingly, most dasatinib-sensitive NSCLC cell lines are found among those with highest copy number for members of the SRC and Ephrin receptor kinase families.

[0236] FIG. 14. Validation of the Target-Enriched Sensitivity Prediction Method that Yielded Genomic Predictors of Dasatinib Sensitivity.

[0237] All cell lines were sorted according to their sensitivity to erlotinib (IC₅₀<1 μM; greybars). Cell lines enriched for sensitivity to erlotinib are found among those with highest copy numbers for EGFR. The contingency table for EGFR (dark grey bars) amplification and erlotinib sensitivity including the p-value determined using fisher's exact test are displayed in the right panel.

[0238] FIG. 15

[0239] Cluster Image of the NSCLC Cell Lines Against Dasatinib Using the 6 Gene Signature Published by Huang et al., (2007)

[0240] To evaluate the predictive value of the 6 gene signature proposed by Huang (2007), Cancer Res 67, 2226-2238, the expression levels of the respective genes were analyzed by hierarchical clustering with the dasatinib sensitivity denoted using the annotation by 0 and 1. The samples with a similar expression profile across these genes are found in the same subcluster. Bright spots represent genes that are repressed, dark spots represent genes that are overexpressed when compared to average mRNA expression levels.

[0241] FIG. 16

[0242] Prostate/Breast Cancer-Gene Signature Associated with Dasatinib Sensitivity

[0243] To evaluate the predictive value of a gene signature proposed by Huang (2007). Cancer Res 67, 2226-2238, the expression levels of the respective genes were analyzed by hierarchical clustering with the dasatinib sensitivity denoted using the annotation by 0 and 1. The samples with a similar expression profile across these genes are found in the same subcluster. Bright spots represent genes that are repressed, dark spots represent genes that are overexpressed when compared to average mRNA expression levels.

[0244] FIG. 17

[0245] All Genes Associated with Dasatinib Sensitivity in Prostate Cancer

[0246] To evaluate the whole gene set signature proposed by Huang (2007), Cancer Res 67, 2226-2238, the expression levels of the respective genes were analyzed by hierarchical clustering with the dasatinib sensitivity denoted using the annotation by 0 and 1. The samples with a similar expression profile across these genes are found in the same subcluster. Bright spots represent genes that are repressed, dark spots represent genes that are overexpressed when compared to average mRNA expression levels.

[0247] FIG. 18. NSCLC Cell Line Panel

[0248] FIG. 18 shows a list of cell lines in the initially tested NSCLC cell line panel, their respective KRAS mutations and the corresponding half-maximal inhibitory concentrations (1050).”

[0249] FIG. 19. Cell Lines

[0250] FIG. 19 shows a set of cell lines which are to be used in accordance with the screening methods provided herein for the identification of drugs, which can be used in anti-cancer treatment/anti-proliferative treatment.

[0251] FIG. 20. A Transgenic Mouse Model of KRAS-Mutant Lung Cancer Transgenic mice expressing a G12D mutation of KRAS specifically in the lung were generated by intranasal application of adenoviral Cre recombinase to Lox-Stop-Lox^{KRASG12D} mice (upper panels from left to right) as described in the literature (Jackson, E. L. et al., Genes Derr 15:3243-3248 (2001); Johnson L. et al., Nature, 410(6832):1111-6 (2001) and Ji H. et al., Nature. 448(7155):807-10 (2007)). These mice develop lethal lung adenocarcinomas at high penetrance (lower panels from left to right). Note that the images were taken from the earlier publications for illustration purposes only.

[0252] FIG. 21. Treatment of Lox-Stop-Lox^{KRASG12D} Mice with HSP90 Inhibitor

[0253] Transgenic mice (as described in FIG. 20) with KRAS-mutant lung tumors were treated with the HSP90 inhibitor 17-DMAG for seven days. Tumor volumes were determined by magnetic resonance imaging and shown as transthoracic images (left panels), quantified and changes in tumor volume relative to the pre-therapy images are given in percent.

[0254] The Examples illustrate the invention.

### EXAMPLE 1

### Methods and Results

### Cells

[0255] Cells were obtained from ATCC (www.atcc.org), DSMZ (www.dsmz.de), from own or from other cell culture collections. Details on all cell lines are listed in FIG. 1. This also contains information on providers and on culture conditions. Cells were routinely controlled for infection with mycoplasm by MycoAlert (www.camhrex.com) and were treated with antibiotics according to a previously published protocol (Uphoff and Drexler. 2005) in case of infection.

### SNP Arrays

[0256] Genomic DNA was extracted from cell lines using the PureGene kit (www.gentra.com) and hybridized to high-density oligonucleotide arrays (Affymetrix, Santa Clara, Calif.) interrogating 238,000 SNP loci on all chromosomes except Y, with a median intermarker distance of 5.2 kb (mean 12.2 kb; www.affymetrix.com). Array experiments were performed according to manufacturer's instructions. SNPs were genotyped by the Affymetrix Genotyping Tools Version 2.0 software. SNP array data of primary samples were obtained from the Tumor Sequencing Project (http://www.genome.gov/cancersequencing/). We applied a novel and general method for Genomic Identification of Significant Targets in Cancer (GISTIC) (Beroukhim et al., 2007) to analyze the dataset. Each genomic marker is scored according to an integrated measure of the prevalence and amplitude of copy-number changes (and only prevalence in the case of LOH), and the statistical significance of each score is assessed by comparison to the results expected from the background aberration rate alone. The GISTIC algorithm was run using two different copy number thresholds to assign genomic segments across the SNP data using the Gain and Loss Analysis of DNA (GLAD) segmentation algorithm (Rupe et al., 2004) with copy number 4 (GLAD threshold 1.0) and copy number 2.14 (GLAD threshold 0.1).

### Detection of Homozygous Deletions

[0257] For the identification of homozygous deletions, SNP data were filtered for five coherent SNPs exhibiting a copy number loss of <0.5. The analysis was focused on focal losses, excluding entire chromosomal arms. Information about genes located in a region of homozygous deletion was based on hg17 build of the human genome sequence from the University of California, Santa Cruz (http://genome.ucsc.edu).

### Analysis of Co-Occurring Lesions

[0258] The analysis was performed computing ratios of observed vs. expected co-occurrence frequency of individual lesions. Hierarchical clustering of mutation data combined to a dichotomized version of quantitative copy number changes was performed using the reciprocal co-occurrence ratio as distance measure with average linkage method. As the adequate threshold for occurrence of copy number lesions depends on the overall level of copy number alteration for that specific lesion, the sum of these ratios for three distinct thresholds was used.

### Mutation Detection

[0259] Mutation status of known oncogene mutations in the genes EGFR, BRAF, ERBB2, PIK3CA, NRAS, KRAS, ABL1, AKT2, CDK4, FGFR1, FGFR3, FLT3, JAK2, KIT, PDGFRA and RET was determined by mass-spectrometric genotyping (Thomas et al., 2007). The mutation status of these genes for all cell lines was published previously (Thomas et al., 2007). In addition, the genes EGFR, BRAF, ERBB2, PIK3CA, KRAS, TP53, STK11, PTEN and CDKN2A were bidirectionally sequenced following PCR-amplification of all coding exons.

[0260] Mutation detection for choice of appropriate therapy depending on the respective mutation has been further developed to compensate for the methodological issues connected with sequencing of tumor samples with high admixture of non-tumoral cells. In our laboratory we have therefore developed the following algorithm: if the tumor content of the tumor specimens is higher or equal than 70% estimated by conventional histomorphology, we have found Sanger dideoxy-chain-termination sequencing to be optimal in terms of cost-efficiency and sensitivity. However, when the tumor content is between 70% and 20% we have found conventional pyrosequencing as, for example, implemented in the Biotage instrument, to deliver higher sensitivity and specificity at acceptable costs. If the tumor content is lower than 20%, we have found massively parallel next-generation sequencing, as for example implemented in the Roche-454 sequencing system (Thomas et al., Nature Medicine July; 12(7):852-5 2006), to be the most sensitive and accurate method in this setting. Together, this algorithm provides high sensitivity in all settings combined with maximum cost-efficiency.

### Expression Arrays

[0261] Expression data were obtained using Affymetrix. U133A arrays from 54 of the cell lines. RNA extraction, hybridization and scanning of arrays were performed using standard procedures (Bhattacharjee et al., 2001). CEL files from U133A arrays were preprocessed using the dChip software. We compared the cell lines to primary lung cancer, renal cell carcinomas and lymphoma specimens as well as to the respective cell lines by hierarchical clustering. For comparison with expression profiles from further entities, we used lung cancer (Lu et al., 2006), renal cell carcinoma (Lenburg et al., 2003) (Shankavaram et al., 2007) and lymphoma (Hummel et al., 2006; Rinaldi et al., 2006) specimen datasets as published in GEO array (http://www.ncbi.nlm.nih.gov/geo/). Data were processed by standard procedures, normalization was performed in dChip (http://biosunl.harvard.edu/complab/dchip/). For comparison of NSCLC cell lines (U133A) and primary tumors, we used data on adenocarcinomas from Bhattacharjee and colleagues generated on U95Av2 arrays. Genes differentially expressed between cell lines with mutated EGFR and wild type EGFR (fold change between groups >2 [90% CI], absolute difference >100 and p<0.005) respectively between erlotinib sensitive and resistant cell lines (erlotinib sensitive (IC₅₀<0.5 μM) vs. erlotinib resistant (IC₅₀>2 μM), fold change >1.5 [90% CI], absolute difference >100, p<0.005) were selected. For principal component analysis, the R language for statistical computing was used. Variable transcripts were identified using the following filtering criteria: coefficient of variation in [1.9; 10], 40% present call rate. The first principal component described 14.5% of the overall variance, the second 9.6% and the third 8.2%. Using a cut-off of 1400, samples were grouped according to the first principal component.

### Cell-Based Screening

[0262] Erlotinib, vandetanib and sunitinib were purchased from commercial suppliers, dissolved in DMSO and stored according to manufacturer's instructions. Cells were plated into sterile microliter plates using a Multidrop instrument (www.thermo.com) and cultured overnight. Compounds were then added in serial dilutions. Cellular viability was determined after 96 h by measuring cellular ATP content using the CellTiter-Glo assay (www.promega.com.). Plates were measured on a Mithras LB940 plate reader (www.bertholdtech.com). Half-maximal inhibitory concentrations were determined from the respective preim.age under the kill curve, where the latter was smoothed according to the logistic function with the parameters appropriately chosen.

### Lesion-Based Prediction of Compound Sensitivity

[0263] For lesion-based prediction of sensitivity, three different approaches were applied. First, the most sensitive and most resistant samples were chosen according to their sensitivity profile. Where the sensitivity profile of the corresponding compound did not allow a clear distinction between resistant and sensitive cell lines, groups were defined by the 25^{th} and 75^{th} percentiles. We used. Fisher's exact test to evaluate the association between the activity of the compound and the presence of significant lesions as defined by GISTIC. For this, the cell line panel was divided according to the presence of each lesion. The logarithmically transformed IC₅₀ values pertinent to each group were now compared by a two-sample t-test. In order to avoid an artificially low variance the t-tests were based on a fixed variance determined as the mean of the variances that were clearly distinct from zero (>0.1).

[0264] In a next step, multi-lesion predictors of sensitivity were calculated using a KNN algorithm with a leave-one-out strategy (Golub et al., 1999), where the same choice of samples was used as above for Fisher's exact test: For all but one sample, genetic lesions strongly discriminating between sensitive and resistant cell lines were selected and the KNN algorithm was based on these. The prediction was validated by the remaining left-out sample. The collection of features where this validation had best performance was taken as the best combined predictor to the respective compound.

[0265] For identification of the best erlotinib single gene predictor, we dichotomized (threshold=0.7) our lesion data. Cell lines with an IC₅₀<0.07 μM were defined as sensitive. For the predictor, the same cutoff values were used. Best performance in the leave-one-cross validation was obtained using 15 features, k=3 neighbours and the cosine-based metric. Due to the problem of multiple hypotheses testing, the significance of the above t-tests as well as Fisher's exact tests should be understood in an explorative rather than confirmative sense.

[0266] In order to validate the finding that single lesions may be associated with sensitivity to a specific inhibitor, we made use of the NCI-60 cancer cell line panel (http://dtp.nci.nih.gov/mtargets/mt_index.html). Since the MEK inhibitor UO126 and the Hsp90 inhibitor 17-AAG were not covered by the collection of pharmacological data, we analyzed the association of the respective lesions to hypothemycin (MEK inhibitor) and to geldanamycin (17-AAG is a geldanamycin derivate) instead. In order to compare the association between lesions and sensitivity, the number of cell lines classified as sensitive or resistant in the lung cancer cell line panel was adapted for the NCI-60 cell line collection for the respective compounds. Significance of association was analyzed by a Fisher's exact test. Due to discordant IC₅₀ values the cell lines H0P62 and A549 were excluded from the analysis with respect to the Hsp90-inhibitors. The thresholds for 1q21.3 amplification were set according to the overall distribution of copy number changes in the respective dataset (2.7 corresponding to 33% of the NSCLC cell lines; 2.4 corresponding to 33% of the NCI-60 collection).

[0267] To evaluate the 6 gene signature proposed by Huang et al. (2007), the expression levels of the respective genes were analyzed by hierarchical clustering (FIG. 17) with the dasatinib sensitivity denoted using the annotation by 0 and 1. The samples with a similar expression profile across these genes are found in the same subcluster. However, the dasatinib-sensitive samples did not form a specific subcluster but were distributed randomly in the columns, suggesting that the signature under consideration is not suitable for prediction of dasatinib vulnerability.

### Generation of EGFR-Mutant Ba/F3 Cells

[0268] EGFR_cDNA was subcloned into pBabe-hygro vectors. The most prevalent NSCLC-derived mutants (http://www.sanger.ac.uk/genetics/CGP/cosmic/) were introduced into the retroviral construct using site-directed mutagenesis (Quick-Change Mutagenesis XL kit: Stratagene, La Jolla, Calif., USA) and virus was packed and produced as previously described (Greulich et al., 2005). Murine Ba/F3 cells were stably transduced with the retroviruses and after IL-3 withdrawal, independently growing cells were chosen for further experiments.

### Structural Modeling of Compound Binding

[0269] The crystal structure of dasatinib and vandetanib bound to the RET kinase (pdb code 21VU (Knowles et al., 2006)) was aligned to the kinase domain of EGFR bound to erlotinib (pdb code 1M17 (Stamos et al., 2002)) using PyMol (http://www.pymol.org). Based on the structural alignment of Abl with EGFR, the binding mode for dasatinib in EGFR is identical to the dasatinib-Abl complex. The piperazine moiety of the inhibitor points out of the ATP site into the solvent while the 2-amino-thiazole forms two hydrogen bonds with the hinge region of the kinase (N3 of the thiazole ring with the amide nitrogen of Met793 Met318 in Abl) and the 2-amino hydrogen of dasatinib with 0 of Met793 (Met318 in Abl). An additional hydrogen bond can form between the side chain hydroxyl of the gatekeeper Thr790 (Thr315 in Abl) and the amide nitrogen of the inhibitor. The chloro-methyl-phenyl ring of dasatinib binds into a hydrophobic pocket near the gatekeeper Thr790 and helix C and would clearly clash with the Met side chain of drug resistant EGFR-T790M. I vandetanib, N1 of the quinazoline scaffold forms one key hydrogen bond to the backbone of the hinge region (Met793 in EGFR, Ala807 in RET kinase). The bromo-fluoro-phenylamine moiety of vandetanib adopts a conformation similar to the ethynyl-phenylamine of erlotinib being close to the side chain of Thr790 in EGFR and Val804 in RET kinase. Figures of the structures were prepared using PyMol.

### Western Blot Analysis

[0270] Whole-cell lysates were prepared in NP40 lysis buffer (50 mmol/L Tris-HCl (pH 7.4). 150 mmol/L NaCl, 1% NP40) supplemented with protease and phosphatase inhibitor I and II cocktails (www.merckbiosciences.co.uk/g.asp?f=CBC/home.html) and clarified by centrifugation. Protein concentrations were determined using the Bicinchoninic Acid Protein Assay kit (www.piercenet.com) and equivalent amounts (40-60 μg) were subjected to SDS-PAGE on 12% gels, except where indicated. Western blotting was done as described previously (Shimamura et al., 2006). Anti-EGFR, anti-phospho-EGFR (Tyr¹⁰⁶⁸) and anti-pAkt antibodies were purchased from Cell Signaling Technology (Beverly. MA). Anti c-raf and anti-cyclin D1 antibodys were purchased from Santa Cruz. Anti KRAS antibody was purchased from Merck.

### Results

### A Genomically Validated Collection of NSCLC Cell Lines

[0271] 84 NSCLC cell lines were collected from various sources (FIG. 1) and formed the basis for all subsequent experiments. Cell lines were derived from tumors representing all major subtypes of NSCLC tumors, including adenocarcinoma, squamous-cell carcinoma and large-cell carcinoma.

[0272] The genomic landscape of these cell lines were characterized by analyzing gene copy number alterations using high-resolution single-nucleotide polymorphism (SNP-) arrays (250K Styl; www.affymetrix.com) We used a novel analytical algorithm called Genomic Identification of Significant Targets in Cancer (GISTIC) to statistically distinguish biologically relevant lesions from background noise (Beroukhim et al., 2007). This method assigns a statistical score to each chromosomal marker reflecting both the mean amplitude and frequency of alterations at a given locus within a data set. The application of GISTIC revealed 16 regions of recurrent, high-level copy number gain (inferred copy number >2.14) and 20 regions of recurrent copy number loss (inferred copy number <1.86) (FIG. 2). Overall, we identified focal peaks with a median width of 1.45 Mb (median 13.5 genes/region) for amplifications and 0.45 Mb for deletions (median 1 gene/region). These regions contain lesions known to occur in NSCLC (e.g., deletion of LRP1B (2q). FHIT (3p). CDKN2A (9p); amplification of MYC (8q), EGFR (7p) and ERBB2 (17q); (FIG. 3A and FIG. 2). Furthermore, within broad regions of copy number gain we also identified amplification of the TITF1 (14q) and TERT (5p) (FIG. 3A and FIG. 2), recently identified by large-scale genomic profiling of primary lung adenocarcinomas (Kendall et al., 2007; Lockwood et al., 2008: Weir et al., 2007).

[0273] Analysis of homozygous deletions (HD) as well as loss of heterozygosity (LOH) is typically hampered by admixture of non-tumoral cells in primary tumors. The purity of cell line DNA permitted identification of previously unknown HD and regions of LOH, including LOH events resulting from uniparental disomy (e.g. copy-neutral events). Regions targeted by LOH encompassed genes shown to be affected by LOH in other tumor types as well as previously unrecognized LOH targets such as TSPAN5 (4q), LRDD (11p), SIRT3 (11p), NLRP6 (11p), BCL2L14 (12p), CDK8 (13q), BCL2L12 (18q), DAPK3 (19p), or UHRF1 (19p). In this analysis known genes such as MTAP (9p) and LATS2 (13q) were altered by HD (Chen et al., 2005; Schmid et al., 1998) and we found novel HD of genes such as TUBA2 or FRK. Of note, most of these regions could also be identified in primary NSCLC tumors as deleted (Weir et al., 2007); however, inferred copy numbers only inconstantly showed LOH or HD, indicating admixture of normal diploid DNA. Thus, while a recent large-scale cancer profiling study (Weir et al., 2007) has enabled insight into the genomic landscape of lung adenocarcinoma, the use of pure populations of tumor cells further afforded discovery of previously unrecognized regions of HD and LOH.

[0274] We next compared the profile of significant amplifications and deletions in this cell line collection with that of a set of 371 primary lung adenocarcinomas (Weir et al., 2007). This comparison revealed a striking similarity between the two data sets (FIG. 3A) but not between NSCLC cell lines and gliomas or melanomas (FIGS. 4A and 4B). A quantitative analysis of similarity by computing correlations of q-values confirmed the similarity of primary lung cancer and lung cancer cell line (r²=0.77) and the lack of similarity of lung cancer cell lines and primary gliomas (Beroukhim et al., 2007) (r²=0.44) or melanoma cell lines (Lin et al., 2008) (r²=0.44; FIG. 4C). Repeated random splitting of the lung cell line data and computation of internal similarity indicated correlations between 0.82 and 0.86 whereas we found no correlation with normal tissue (r²=0.0195; FIG. 4C). These results demonstrate that the genomic copy number landscape of NSCLC cell lines reflects that of primary NSCLC tumors, while tumors or cell lines of other lineages show a much lower degree of similarity (Greshock et al., 2007; Jong et al., 2007). Furthermore, the distribution of oncogene mutations in the cell lines was similar to those in primary NSCLC tumors with a high prevalence of mutations in the KRAS and EGFR genes (Aviel-Ronen et al., 2006; Bamford et al., 2004; Sharma et al., 2007; Thomas et al., 2007) and rare occurrence of PIK3CA and BRAF mutations (FIG. 3B). These results further validate our cell line collection on a genetic level.

[0275] The availability of two dimensions of genetic information (chromosomal copy number alterations and mutations) from the NSCLC cell lines enabled us to analyze the interactions of both types of lesions (FIG. 3C). Hierarchical clustering of lesions robustly grouped both mutations and amplification of EGFR in one subcluster (ratio Q of observed vs. expected co-occurrence: Q=4.38, p=0.001) while KRAS mutations consistently grouped in a distinct cluster. These findings corroborate prior observations in vivo where mutations in KRAS and EGFR are mutually exclusive while EGFR mutation and EGFR amplification frequently co-occur (Kaye, 2005; Pao et al., 2005b; Sharma et al., 2007). Moreover, these results strongly suggest that each of these mutations conditions the larger sets of genomic alterations in a specific manner.

[0276] Finally, in cluster analyses of gene expression data primary lung cancer specimens (Lu et al., 2006) and lung cancer cell lines shared one cluster (FIG. 3D) while renal cell carcinomas (Lenburg et al., 2003) and lymphomas (Hummel et al., 2006) clustered in a separate group. In summary, in-depth comparative analysis of orthogonal genomic data sets of a large panel of NSCLC cell lines and primary tumors demonstrates that these cell lines reflect the genetic and transcriptional landscape of primary NSCLC tumors.

[0277] EGFR Mutations Define Phenotypic Properties of Lung Tumors In Vitro and In Vivo

[0278] Activated oncogenes typically cause a transcriptional signature that can be used to identify tumors carrying such oncogenes (Bild et al., 2006; Lamb et al., 2003). However, we consistently failed to identify a gene expression signature specific for EGFR-mutant tumors using a annotated gene expression data set of 123 primary lung adenocarcinomas (Bhattacharjee et al., 2001) (data not shown). We therefore reasoned that the cellular purity of our cell lines might enable extracting such a signature and its translation to primary tumors. We applied principal component analyses on the variable genes and found a remarkable grouping of all EGFR mutated cell lines with a significant dissociation already in the first principal component (p=0.0005) contributing 14.5% to the overall variance (FIG. 5A). Similar results were obtained by hierarchical clustering (data not shown). Using genes differentially expressed in EGFR-mutant cell lines as a surrogate feature, all of the EGFR-mutant primary tumors were grouped in a distinct cluster when performing hierarchical clustering (FIG. 5B). This result was also recapitulated when selecting genes differentially expressed in erlotinib-sensitive cell lines (FIG. 6A). Furthermore, patients with a tumor expressing the signature of EGFR mutated cell lines had a better overall survival than those whose tumors did not, even when excluding EGFR-mutant tumors (FIG. 5C) as seen in vivo (Eberhard et al., 2005b). These data also point to the fact that expression signatures extracted in vitro can be used to identify biologically diverse tumors in vivo, a concept recently developed and validated (Nevins and Potti, 2007).

[0279] Others have recently characterized a transcriptional signature of EGFR mutant NSCLC: using a small set of cell lines (Choi et al., 2007). However, when analyzing primary lung adenocarcinomas with the signature described by Choi et al. EGFR-mutant samples were randomly distributed across the data set (FIG. 6B). This finding further highlights the importance of using large cell line collections in order to represent the overall genomic diversity of primary tumors.

[0280] In patients, tumor regression or “response” to EGFR inhibitors such as erlotinib is correlated with mutations in the EGFR gene (Lynch et al., 2004; Paez et al., 2004; Pao et al., 2004). To systematically identify genetic lesions associated with sensitivity to erlotinib we determined erlotinib sensitivity in all cell lines. Then, we analyzed the distribution of genetic lesions in sensitive compared to insensitive cell lines (FIG. 7) and further compared the mean sensitivity of cell lines with and without the respective genetic lesion. In both analyses, EGFR mutations were the best single-lesion predictor of erlotinib sensitivity (FIG. 5D, p<0.0001). Furthermore, we found a less stringent association with amplification of EGFR; however, only EGFR mutations were significant predictors of erlotinib sensitivity when adjusting for multiple hypothesis testing using either Bonferroni or FDR-based methods (data not shown).

[0281] We next used signal-to-noise based feature selection combined with the KNN algorithm (Golub et al., 1999; Reich et al., 2006) to build a multi-lesion predictor of erlotinib sensitivity. The best performing multi-lesion predictor comprised EGFR mutations, amplification of EGFR and lack of KRIS mutations (FIG. 8) which have all been implicated in determining responsiveness of NSCLC patients to EGFR inhibitors (Cappuzzo et al., 2005; Hirsch et al., 2005; Lynch et al., 2004; Paez et al., 2004; Pao et al., 2004; Pao et al., 2005b; Tsao et al., 2005). These results underscore the role of EGFR mutations in conferring sensitivity to erlotinib in a systematic computational analysis involving global genetic lesion profiles. Furthermore, these findings imply that essential transcriptional and cell biology phenotypes of the original tumors are preserved in the cell lines, a necessary requirement for application of such collections as proxies in preclinical drug target validation efforts.

### Differential Activity of Compounds in Clinical Development in NSCLC Cell Lines

[0282] Having validated the cell line collection by demonstrating their genomic and phenotypic similarity to primary NSCLC tumors, we reasoned that adding complex phenotypic data might elicit additional insights into how cancer genotypes impact cell biology phenotypes. We therefore established a high-throughput cell-line screening platform that enables systematic chemical perturbations across the entire cell line panel in a short time. In our initial pilot screening experiment we profiled all cell lines against 10 inhibitors that are either under clinical evaluation or showed high activity in preclinical models; these compounds target a wide spectrum of relevant proteins in cancer (FIG. 9). We treated all cell lines with these compounds and determined IC₅₀ values (FIG. 7). The resulting sensitivity patterns (FIG. 10) revealed that while some of the compounds exhibited a pronounced cytotoxic activity in a small subset of cell lines (e.g. erlotinib, vandetanib, VX-680), others were active in most of the cell lines with only a minority being resistant (e.g. 17-AAG). Only two cell lines (<2%) were resistant to all of the compounds (FIG. 7) suggesting that most NSCLC tumors might be amenable to targeted treatment. Overall, these observations are highly reminiscent of patient responses in clinical trials where limited subsets of patients experience partial or complete response while the majority of patients exhibit stable disease, no change or progression. Thus, high-throughput cell-line screening may help estimate the fraction of tumors that are sensitive to a novel compound in development.

### Identification of Relevant Compound Targets by Similarity Profiling

[0283] As an initial approach to identify shared targets of inhibitors, we performed hierarchical clustering based on similarity of sensitivity profiles (FIG. 11A) and based on the correlation between sensitivity and genomic lesion profiles (FIG. 11B). Erlotinib and vandetanib exhibited the highest degree of similarity pointing to mutant EGFR as the critical target of vandetanib in NSCLC tumor cells (FIGS. 11A and 11B). The high degree of correlation (r²=0.91; p<0.001;) of cell line IC₅₀ values for both compounds as well as structural modelling of vandetanib binding in the EGFR kinase domain which revealed a binding mode identical to that of erlotinib further corroborate this notion (FIG. 12A). Notably, this model predicted that binding of both compounds would be prevented by the T790M resistance mutations of EGFR; accordingly, Ba/F3 cells expressing erlotinib-sensitizing mutations of EGFR together with T790M were completely resistant to erlotinib and vandetanib (FIGS. 12A and 11D).

[0284] In addition to vandetanib, PD168393, a known irreversible EGFR inhibitor (Sos et al., 2008), and the SRC/ABL, inhibitor dasatinib (Shah et al., 2004) shared a cluster with erlotinib (FIGS. 11A and B). Molecular modeling of dasatinib binding to EGFR predicted a binding mode similar to that of erlotinib (FIG. 11C) with a steric clash of erlotinib and dasatinib with the erlotinib resistance mutation T790M (Kobayashi et al., 2005: Pao et al., 2005a; Yun et al., 2007) (FIG. 11C). We formally validated EGFR as a relevant tumor cell target of dasatinib by showing cytotoxicity as well as EGFR dephosphorylation (Song et al., 2006) elicited by this compound in Ba/F3 cells ectopically expressing mutant EGFR but not in those co-expressing the T790M resistance allele (FIG. 11D). Thus, our approach identified a relevant tumor-cell target of an FDA-approved drug using a systematic unbiased approach. Note that a trial of dasatinib in patients with acquired erlotinib resistance is currently ongoing (trial-Id: NCT00570401, http://clinicaltrials.gov/ct2/home); we predict limited activity of dasatinib in those patients in which acquired resistance is due to the T790M mutation.

### Supervised Learning to Identify Predictors for Inhibitor Responsiveness

[0285] As an alternative method for predicting inhibitor-responsiveness from global lesion data in a systematic fashion we applied supervised learning methods (Golub et al., 1999) as we had applied for erlotinib (see above). Applying this method we identified robust, genetic lesion-based predictors for activity of erlotinib (see above), vandetanib, PD168393, dasatinib, VX-680, 17-AAG and UO126 (FIG. 8) Supporting the results from our cluster analyses followed by structural modeling, mutations in EGFR were the best predictor for activity of erlotinib, PD168393, vandetanib and dasatinib (FIG. 8).

[0286] In our initial cluster analysis we found that KRAS mutations correlated with sensitivity to the Hsp90 inhibitor 17-AAG, a geldanamycin derivative (FIG. 13A). Using our KNN-based prediction approach, KRAS mutations were also predictive of 17-AAG sensitivity (p=0.0307, FIG. 13A. Validating this observation in an independent data set, we found the distribution of geldanamycin sensitivity and KRAS mutation in the NCI-60 cell line panel to be strikingly similar to the one observed in our panel (p=0.049; FIG. 13A). In sensitive cell lines, 17-AAG treatment reduced protein levels of c-RAF and Ala but not KRAS (FIG. 13B). Since both c-RAF and Akt are known Hsp90 clients (Basso et al., 2002; Grbovic et al., 2006), KRAS mutations may lead to dependency on activation of the Akt and RAF-MEK-ERK signaling pathways thus rendering the cells sensitive to Hsp90 inhibitors.

[0287] U0126 is a MEK inhibitor that also showed enhanced activity in a subset of the lung cancer cell line collection. Here, the KNN-prediction approach identified chromosomal gains of 1q21.3 affecting the genes ARNT and RAB13 were robustly associated with UO126 sensitivity (Fisher's exact test, p=0.0442; FIGS. 13C and 14A). In order to validate this finding in an independent data set, again we made use of the NCI-60 cancer cell line panel (Shoemaker, 2006) where hypothemycin was used as a MEK inhibitor (Solit et al., 2006). This cross-platform validation revealed that 1q21.3 gain predicts sensitivity to MEK inhibition in both datasets (Fisher's exact test, p=0.042 NSCLC cell lines; p=0.035 NCI-60 collection). Thus, cell line profiling coupled to systematic, lesion-based prediction of drug sensitivity led to predictors that could be validated in an independent data set.

### Compound Target Gene Enrichment to Predict Sensitivity

[0288] Amplification of target genes has been demonstrated to predict vulnerability to target-specific compounds in ERBB2 amplified breast cancer and EGFR amplified lung cancer. We therefore speculated that chromosomal copy number alterations of biochemically defined drug targets could be used for prediction of sensitivity to other tyrosine kinase inhibitors. To this end we used relevant tyrosine kinase inhibitor targets defined by the quantitative dissociation constant as determined in quantitative kinase assays (Karaman et al., 2008). As a proof of principal we tested whether copy number gain in EGFR is associated with sensitivity to erlotinib. In our systematic approach erlotinib sensitive cell lines were highly enriched for amplification (cn >3) of EGFR (p=0.000082) (FIG. 14). We next performed a limited screen (30 cell lines) of lapatinib, a specific inhibitor of EGFR and ERBB2. Again, we observed lapatinib sensitive cell lines to be significantly enriched in cell lines with amplified EGFR or ERBB2 genes (p=0.0265; data not shown).

[0289] Encouraged by these findings we set out to test our approach for compounds with a broad range of inhibited kinases such as dasatinib (Karaman et al., 2008). We ranked cell lines according to chromosomal copy number gain, at either one of the biochemically most sensitive dasatinib targets (K_{d}<1 nM). Those cell lines were significantly enriched for sensitivity to this compound (p=0.003, FIG. 13D). In particular, this predictor comprised gain at gene family members of Ephrin receptor and Src kinases suggesting that NSCLC cells harboring such lesions might be exquisitely sensitive to therapeutic inhibition of the encoded proteins. By contrast, copy number gain involving loci encoding biochemically less sensitive dasatinib targets failed to show enrichment of sensitive cell lines (data not shown). We therefore conclude that in NSCLC, copy number gain of Ephrin receptor or SRC family member genes renders the cells dependent on these kinases exposing a vulnerability to therapeutic inhibition with dasatinib.

### EXAMPLE 2

### Animal Data Show that Mice with KRAS-Driven Lung Adenocarcinomas are Susceptible to Treatment with an HSP90 Inhibitor

[0290] This in vivo experiment confirms that mice genetically engineered to develop KRAS-driven lung adenocarcinomas are susceptible to treatment with an HSP90 inhibitor.

[0291] These mice carry a Lox-Stop-Lox-KRAS_G12D gene. Upon administration of adenoviral Cre by nasal inhalation, these mice develop lung cancers with high penetrance, leading to rapid death from the disease. This mouse model therefore represents the most stringent and optimal model of KRAS-mutant human lung cancer and was therefore chosen for in vivo experiments; see FIG. 20. Mice received 20 mg/kg/d of 17-DMAG, a geldanamycin HSP90 inhibitor with almost identical structure as 17-AAG. In vitro data confirmed that the biological effects seen with 17-AAG in the cell lines were identical to those seen with 17-DMAG (data not shown).

[0292] After only one week of treatment 2 of 3 mice showed dramatic regression of tumors as measured by MRI imaging; see FIG. 21. The third mice showed a slight but insignificant reduction of tumor burden, comparable to stable disease. By contrast, untreated mice invariably show rapid tumor progression and die quickly from disease.

[0293] The present invention refers to the following nucleotide sequences:

[0294] The sequences provided herein are available in the NCBI database and can be retrieved from www.ncbi.nlm.nih.gov/sites/entrez?db=gene; Theses sequences also relate to annotated and modified sequences. The present invention also provides techniques and methods wherein homologous sequences, and also genetic allelic variants and the like of the concise sequences provided herein are used. Preferably, such “variants” are genetic variants.

### SEQ ID No. 1:

[0295] Nucleotide sequence encoding Homo sapiens v-Ki-ras2 Kirsten rat sarcoma viral oncogene homolog (KRAS), transcript variant b (isoform b), mRNA (>gi|34485723|ret|NM_{—}004985.3). The coding region ranges from nucleotide 182 to nucleotide 748.

### SEQ ID No. 2:

[0296] Amino acid sequence of Homo sapiens v-Ki-ras2 Kirsten rat sarcoma viral oncogene homolog (KRAS)

### SEQ ID No. 3:

[0297] Nucleotide sequence encoding mutated Homo sapiens v-Ki-ras2 Kirsten rat sarcoma viral oncogene homolog (KRAS), transcript variant a, mutation KRAS_G12V. The coding region ranges from nucleotide 182 to nucleotide 751.

### SEQ ID No. 4:

[0298] Amino acid sequence of mutated Homo sapiens v-Ki-ras2 Kirsten rat sarcoma viral oncogene homolog (KRAS), mutation KRAS_G12V

### SEQ ID No. 5:

[0299] Nucleotide sequence encoding mutated Homo sapiens v-Ki-ras2 Kirsten rat sarcoma viral oncogene homolog (KRAS), transcript variant a, mutation KRAS_G12S. The coding region ranges from nucleotide 182 to nucleotide 751.

### SEQ ID No. 6:

[0300] Amino acid sequence of mutated Homo sapiens v-Ki-ras2 Kirsten rat sarcoma viral oncogene homolog (KRAS), mutation KRAS_G12S

### SEQ ID No. 7:

[0301] Nucleotide sequence encoding mutated Homo sapiens v-Ki-ras2 Kirsten rat sarcoma viral oncogene homolog (KRAS), transcript variant a, mutation KRAS_G12A. The coding region ranges from nucleotide 182 to nucleotide 751.

### SEQ ID No. 8:

[0302] Amino acid sequence of mutated Homo sapiens v-Ki-ras2 Kirsten rat sarcoma viral oncogene homolog (KRAS), mutation KRAS_G12A

### SEQ ID No. 9:

[0303] Nucleotide sequence encoding mutated Homo sapiens v-Ki-ras2 Kirsten rat sarcoma viral oncogene homolog (KRAS), transcript variant a, mutation KRAS_G12D. The coding region ranges from nucleotide 182 to nucleotide 751.

### SEQ ID No. 10:

[0304] Amino acid sequence of mutated Homo sapiens v-Ki-ras2 Kirsten rat sarcoma viral oncogene homolog (KRAS), mutation KRAS_G12D.

### SEQ ID No. 11:

[0305] Nucleotide sequence encoding mutated Homo sapiens v-Ki-ras2 Kirsten rat sarcoma viral oncogene homolog (KRAS), transcript variant a, mutation KRAS_G12C. The coding region ranges from nucleotide 182 to nucleotide 751.

### SEQ ID No. 12:

[0306] Amino acid sequence of mutated Homo sapiens v-Ki-ras2 Kirsten rat sarcoma viral oncogene homolog (KRAS), mutation KRAS_G12C

### SEQ ID No. 13:

[0307] Nucleotide sequence encoding mutated Homo sapiens v-Ki-ras2 Kirsten rat sarcoma viral oncogene homolog (KRAS), transcript variant a, mutation KRAS_G12R. The coding region ranges from nucleotide 182 to nucleotide 751.

### SEQ ID No. 14:

[0308] Amino acid sequence of mutated Homo sapiens v-Ki-ras2 Kirsten rat sarcoma viral oncogene homolog (KRAS), mutation KRAS_G12R

### SEQ ID No. 15:

[0309] Nucleotide sequence encoding mutated Homo sapiens v-Ki-ras2 Kirsten rat sarcoma viral oncogene homolog (KRAS), transcript variant a, mutation KRAS_G12F. The coding region ranges from nucleotide 182 to nucleotide 751.

### SEQ ID No. 16:

[0310] Amino acid sequence of mutated Homo sapiens v-Ki-ras2 Kirsten rat sarcoma viral oncogene homolog (KRAS), mutation KRAS_G12F

### SEQ ID No. 17:

[0311] Nucleotide sequence encoding mutated Homo sapiens v-Ki-ras2 Kirsten rat sarcoma viral oncogene homolog (KRAS), transcript variant a, mutation KRAS_G13C. The coding region ranges from nucleotide 182 to nucleotide 751.

### SEQ ID No. 18:

[0312] Amino acid sequence of mutated Homo sapiens v-Ki-ras2 Kirsten rat sarcoma viral oncogene homolog (KRAS), mutation KRAS_G13C

### SEQ ID No. 19:

[0313] Nucleotide sequence encoding mutated Homo sapiens v-Ki-ras2 Kirsten rat sarcoma viral oncogene homolog (KRAS), transcript variant a, mutation KRAS_G13D. The coding region ranges from nucleotide 182 to nucleotide 751.

### SEQ ID No. 20:

[0314] Amino acid sequence of mutated Homo sapiens v-Ki-ras2 Kirsten rat sarcoma viral oncogene homolog (KRAS), mutation KRAS_G13D

### SEQ ID No. 21:

[0315] Nucleotide sequence encoding mutated Homo sapiens v-Ki-ras2 Kirsten rat sarcoma viral oncogene homolog (KRAS), transcript variant a, mutation KRAS_G13S. The coding region ranges from nucleotide 182 to nucleotide 751.

### SEQ ID No. 22:

[0316] Amino acid sequence of mutated Homo sapiens v-Ki-ras2 Kirsten rat sarcoma viral oncogene homolog (KRAS), mutation KRAS_G13S

### SEQ ID No. 23:

[0317] Nucleotide sequence encoding mutated Homo sapiens v-Ki-ras2 Kirsten rat sarcoma viral oncogene homolog (KRAS), transcript variant a, mutation KRAS_G13V. The coding region ranges from nucleotide 182 to nucleotide 751.

### SEQ ID No. 24:

[0318] Amino acid sequence of mutated Homo sapiens v-Ki-ras2 Kirsten rat sarcoma viral oncogene homolog (KRAS), mutation KRAS_G13V

### SEQ ID No. 25:

[0319] Nucleotide sequence encoding mutated Homo sapiens v-Ki-ras2 Kirsten rat sarcoma viral oncogene homolog (KRAS), transcript variant a, mutation KRAS_A59T. The coding region ranges from nucleotide 182 to nucleotide 751.

### SEQ ID No. 26:

[0320] Amino acid sequence of mutated Homo sapiens v-Ki-ras2 Kirsten rat sarcoma viral oncogene homolog (KRAS), mutation. KRAS_A59T

SEQ ID No. 27: Nucleotide sequence encoding mutated Homo sapiens v-Ki-ras2 Kirsten rat sarcoma viral oncogene homolog (KRAS), transcript variant a, mutation KRAS_Q61E. The coding region ranges from nucleotide 182 to nucleotide 751.

### SEQ ID No. 28:

[0321] Amino acid sequence of mutated Homo sapiens v-Ki-ras2 Kirsten rat sarcoma viral oncogene homolog (KRAS), mutation KRAS_Q61E. The coding region ranges from nucleotide 182 to nucleotide 751.

### SEQ ID No. 29:

[0322] Nucleotide sequence encoding mutated Homo sapiens v-Ki-ras2 Kirsten rat sarcoma viral oncogene homolog (KRAS), transcript variant a, mutation KRAS_Q61H. The coding region ranges from nucleotide 182 to nucleotide 751.

### SEQ ID No. 30:

[0323] Amino acid sequence of mutated Homo sapiens v-Ki-ras2 Kirsten rat sarcoma viral oncogene homolog (KRAS), mutation KRAS_Q61H

### SEQ ID No. 31:

[0324] Nucleotide sequence encoding mutated Homo sapiens v-Ki-ras2 Kirsten rat sarcoma viral oncogene homolog (KRAS), transcript variant a, mutation KRAS_Q61H. The coding region ranges from nucleotide 182 to nucleotide 751.

### SEQ ID No. 32:

[0325] Amino acid sequence of mutated Homo sapiens v-Ki-ras2 Kirsten rat sarcoma viral oncogene homolog (KRAS), mutation KRAS_Q61H

### SEQ ID No. 33:

[0326] Nucleotide sequence encoding mutated Homo sapiens v-Ki-ras2 Kirsten rat sarcoma viral oncogene homolog (KRAS), transcript variant a, mutation KRAS_Q61K. The coding region ranges from nucleotide 182 to nucleotide 751.

### SEQ ID No. 34:

[0327] Amino acid sequence of mutated Homo sapiens v-Ki-ras2 Kirsten rat sarcoma viral oncogene homolog (KRAS), mutation KRAS_Q61K.

### SEQ ID No. 35:

[0328] Nucleotide sequence encoding mutated Homo sapiens v-Ki-ras2 Kirsten rat sarcoma viral oncogene homolog (KRAS), transcript variant a, mutation KRAS_Q61L. The coding region ranges from nucleotide 182 to nucleotide 751.

### SEQ ID No. 36:

[0329] Amino acid sequence of mutated Homo sapiens v-Ki-ras2 Kirsten rat sarcoma viral oncogene homolog (KRAS), mutation KRAS_Q61L

### SEQ ID No. 37:

[0330] Nucleotide sequence encoding mutated Homo sapiens v-Ki-ras2 Kirsten rat sarcoma viral oncogene homolog (KRAS), transcript variant a, mutation KRAS_Q61R. The coding region ranges from nucleotide 182 to nucleotide 751.

### SEQ ID No. 38:

[0331] Amino acid sequence of mutated Homo sapiens v-Ki-ras2 Kirsten rat sarcoma viral oncogene homolog (KRAS), mutation KRAS_Q61R

### SEQ ID No. 39:

[0332] Nucleotide sequence encoding mutated Homo sapiens v-Ki-ras2 Kirsten rat sarcoma viral oncogene homolog (KRAS), transcript variant a, mutation KRAS_Q61P. The coding region ranges from nucleotide 182 to nucleotide 751.

### SEQ ID No. 40:

[0333] Amino acid sequence of mutated Homo sapiens v-Ki-ras2 Kirsten rat sarcoma viral oncogene homolog (KRAS), mutation KRAS_Q61P

### SEQ ID No. 41:

[0334] Nucleotide sequence encoding mutated Homo sapiens v-Ki-ras2 Kirsten rat sarcoma viral oncogene homolog (KRAS), transcript variant b, mutation KRAS_G12V. The coding region ranges from nucleotide 182 to nucleotide 748.

### SEQ ID No. 42:

[0335] Amino acid sequence of mutated Homo sapiens v-Ki-ras2 Kirsten rat sarcoma viral oncogene homolog (KRAS), mutation KRAS_G12V

### SEQ ID No. 43:

[0336] Nucleotide sequence encoding mutated Homo sapiens v-Ki-ras2 Kirsten rat sarcoma viral oncogene homolog (KRAS), transcript variant b, mutation. KRAS_G12S. The coding region ranges from nucleotide 182 to nucleotide 748.

### SEQ ID No. 44:

[0337] Amino acid sequence of mutated Homo sapiens v-Ki-ras2 Kirsten rat sarcoma viral oncogene homolog (KRAS), mutation KRAS_G12S

### SEQ ID No. 45:

[0338] Nucleotide sequence encoding mutated Homo sapiens v-Ki-ras2 Kirsten rat sarcoma viral oncogene homolog (KRAS), transcript variant b, mutation KRAS_G12A. The coding region ranges from nucleotide 182 to nucleotide 748.

### SEQ ID No. 46:

[0339] Amino acid sequence of mutated Homo sapiens v-Ki-ras2 Kirsten rat sarcoma viral oncogene homolog (KRAS), mutation KRAS_G12A

### SEQ ID No. 47:

[0340] Nucleotide sequence encoding mutated Homo sapiens v-Ki-ras2 Kirsten rat sarcoma viral oncogene homolog (KRAS), transcript variant b, mutation KRAS_G12D. The coding region ranges from nucleotide 182 to nucleotide 748.

### SEQ ID No. 48:

[0341] Amino acid sequence of mutated Homo sapiens v-Ki-ras2 Kirsten rat sarcoma viral oncogene homolog (KRAS), mutation KRAS_G12D

### SEQ ID No. 49:

[0342] Nucleotide sequence encoding mutated Homo sapiens v-Ki-ras2 Kirsten rat sarcoma viral oncogene homolog (KRAS), transcript variant b, mutation KRAS_G12C. The coding region ranges from nucleotide 182 to nucleotide 748.

### SEQ ID No. 50:

[0343] Amino acid sequence of mutated Homo sapiens v-Ki-ras2 Kirsten rat sarcoma viral oncogene homolog (KRAS), mutation KRAS_G12C

### SEQ ID No. 51:

[0344] Nucleotide sequence encoding mutated Homo sapiens v-Ki-ras2 Kirsten rat sarcoma viral oncogene homolog (KRAS), transcript variant b, mutation KRAS_G12R. The coding region ranges from nucleotide 182 to nucleotide 748.

### SEQ ID No. 52:

[0345] Amino acid sequence of mutated Homo sapiens v-Ki-ras2 Kirsten rat sarcoma viral oncogene homolog (KRAS), mutation KRAS_G12R

### SEQ ID No. 53:

[0346] Nucleotide sequence encoding mutated Homo sapiens v-Ki-ras2 Kirsten rat sarcoma viral oncogene homolog (KRAS), transcript variant b, mutation KRAS_G12F. The coding region ranges from nucleotide 182 to nucleotide 748.

### SEQ ID No. 54:

[0347] Amino acid sequence of mutated Homo sapiens v-Ki-ras2 Kirsten rat sarcoma viral oncogene homolog (KRAS), mutation KRAS_G12F

### SEQ ID No. 55:

[0348] Nucleotide sequence encoding mutated Homo sapiens v-Ki-ras2 Kirsten rat sarcoma viral oncogene homolog (KRAS), transcript variant b, mutation KRAS_G13C. The coding region ranges from nucleotide 182 to nucleotide 748.

### SEQ ID No. 56:

[0349] Amino acid sequence of mutated Homo sapiens v-Ki-ras2 Kirsten rat sarcoma viral oncogene homolog (KRAS), mutation KRAS_G13C

### SEQ ID No. 57:

[0350] Nucleotide sequence encoding mutated Homo sapiens v-Ki-ras2 Kirsten rat sarcoma viral oncogene homolog (KRAS), transcript variant b, mutation KRAS_G13D. The coding region ranges from nucleotide 182 to nucleotide 748.

### SEQ ID No. 58:

[0351] Amino acid sequence of mutated Homo sapiens v-Ki-ras2 Kirsten rat sarcoma viral oncogene homolog (KRAS) mutation KRAS_G13D

### SEQ ID No. 59:

[0352] Nucleotide sequence encoding mutated Homo sapiens v-Ki-ras2 Kirsten rat sarcoma viral oncogene homolog (KRAS), transcript variant b, mutation KRAS_G13S. The coding region ranges from nucleotide 182 to nucleotide 748.

### SEQ ID No. 60:

[0353] Amino acid sequence of mutated Homo sapiens v-Ki-ras2 Kirsten rat sarcoma viral oncogene homolog (KRAS), mutation KRAS_G13S

### SEQ ID No. 61:

[0354] Nucleotide sequence encoding mutated Homo sapiens v-Ki-ras2 Kirsten rat sarcoma viral oncogene homolog (KRAS), transcript variant b, mutation KRAS_G13V. The coding region ranges from nucleotide 182 to nucleotide 748.

### SEQ ID No. 62:

[0355] Amino acid sequence of mutated Homo sapiens v-Ki-ras2 Kirsten rat sarcoma viral oncogene homolog (KRAS), mutation KRAS_G13V

### SEQ ID No. 63:

[0356] Nucleotide sequence encoding mutated Homo sapiens v-Ki-ras2 Kirsten rat sarcoma viral oncogene homolog (KRAS), transcript variant b, mutation KRAS_A59T. The coding region ranges from nucleotide 182 to nucleotide 748.

### SEQ ID No. 64:

[0357] Amino acid sequence of mutated Homo sapiens v-Ki-ras2 Kirsten rat sarcoma viral oncogene homolog (KRAS), mutation KRAS_A59T

### SEQ ID No. 65:

[0358] Nucleotide sequence encoding mutated Homo sapiens v-Ki-ras2 Kirsten rat sarcoma viral oncogene homolog (KRAS), transcript variant b, mutation KRAS_Q61E. The coding region ranges from nucleotide 182 to nucleotide 748.

### SEQ ID No. 66:

[0359] Amino acid sequence of mutated Homo sapiens v-Ki-ras2 Kirsten rat sarcoma viral oncogene homolog (KRAS), mutation KRAS_Q61E

### SEQ ID No. 67:

[0360] Nucleotide sequence encoding mutated Homo sapiens v-Ki-ras2 Kirsten rat sarcoma viral oncogene homolog (KRAS), transcript variant b, mutation KRAS_Q61H. The coding region ranges from nucleotide 182 to nucleotide 748.

### SEQ ID No. 68:

[0361] Amino acid sequence of mutated Homo sapiens v-Ki-ras2 Kirsten rat sarcoma viral oncogene homolog (KRAS), mutation KRAS_Q61H

### SEQ ID No. 69:

[0362] Nucleotide sequence encoding mutated. Homo sapiens v-Ki-ras2 Kirsten rat sarcoma viral oncogene homolog (KRAS), transcript variant b, mutation KRAS_Q61H. The coding region ranges from nucleotide 182 to nucleotide 748.

### SEQ ID No. 70:

[0363] Amino acid sequence of mutated Homo sapiens v-Ki-ras2 Kirsten rat sarcoma viral oncogene homolog (KRAS), mutation KRAS_Q61H

### SEQ ID No. 71:

[0364] Nucleotide sequence encoding mutated Homo sapiens v-Ki-ras2 Kirsten rat sarcoma viral oncogene homolog (KRAS), transcript variant b, mutation KRAS_Q61K. The coding region ranges from nucleotide 182 to nucleotide 748.

### SEQ ID No. 72:

[0365] Amino acid sequence of mutated Homo sapiens v-Ki-ras2 Kirsten rat sarcoma viral oncogene homolog (KRAS), mutation KRAS_Q61K

### SEQ ID No. 73:

[0366] Nucleotide sequence encoding mutated Homo sapiens v-Ki-ras2 Kirsten rat sarcoma viral oncogene homolog (KRAS), transcript variant b, mutation KRAS_Q61L. The coding region ranges from nucleotide 182 to nucleotide 748.

### SEQ ID No. 74:

[0367] Amino acid sequence of mutated Homo sapiens v-Ki-ras2 Kirsten rat sarcoma viral oncogene homolog (KRAS), mutation KRAS_Q61L

### SEQ ID No. 75:

[0368] Nucleotide sequence encoding mutated Homo sapiens v-Ki-ras2 Kirsten rat sarcoma viral oncogene homolog (KRAS), transcript variant b, mutation KRAS_Q61R. The coding region ranges from nucleotide 182 to nucleotide 748.

### SEQ ID No. 76:

[0369] Amino acid sequence of mutated Homo sapiens v-Ki-ras2 Kirsten rat sarcoma viral oncogene homolog (KRAS), mutation KRAS_Q61R

### SEQ ID No. 77:

[0370] Nucleotide sequence encoding mutated Homo sapiens v-Ki-ras2 Kirsten rat sarcoma viral oncogene homolog (KRAS), transcript variant b, mutation KRAS_Q61P. The coding region ranges from nucleotide 182 to nucleotide 748.

### SEQ ID No. 78:

[0371] Amino acid sequence of mutated Homo sapiens v-Ki-ras2 Kirsten rat sarcoma viral oncogene homolog (KRAS), mutation KRAS_Q61P

### SEQ ID No. 79:

[0372] Nucleotide sequence encoding mutated Homo sapiens BRAF, mutation BRAF_G464R. The coding region ranges from nucleotide 62 to nucleotide 2362.

### SEQ ID No. 80:

[0373] Amino acid sequence of mutated Homo sapiens BRAF, mutation BRAF_G464R

### SEQ ID No. 81:

[0374] Nucleotide sequence encoding mutated. Homo sapiens BRAF, mutation BRAF_G464V. The coding region ranges from nucleotide 62 to nucleotide 2362.

### SEQ ID No. 82:

[0375] Amino acid sequence of mutated Homo sapiens BRAF, mutation BRAF_G1464V

### SEQ ID No. 83:

[0376] Nucleotide sequence encoding mutated Homo sapiens BRAF, mutation BRAF_G466A. The coding region ranges from nucleotide 62 to nucleotide 2362.

### SEQ ID No. 84:

[0377] Amino acid sequence of mutated Homo sapiens BRAF, mutation BRAF_G466A.

### SEQ ID No. 85:

[0378] Nucleotide sequence encoding mutated Homo sapiens BRAF, mutation BRAF The coding region ranges from nucleotide 62 to nucleotide 2362.

### SEQ ID No. 86:

[0379] Amino acid sequence of mutated Homo sapiens BRAF, mutation BRAF_G466R

### SEQ ID No. 87:

[0380] Nucleotide sequence encoding mutated Homo sapiens BRAF, mutation BRAF_F468C. The coding region ranges from nucleotide 62 to nucleotide 2362.

### SEQ ID No. 88:

[0381] Amino acid sequence of mutated Homo sapiens BRAF, mutation BRAF_F468C

### SEQ ID No. 89:

[0382] Nucleotide sequence encoding mutated Homo sapiens BRAF, mutation BRAF_G469R. The coding region ranges from nucleotide 62 to nucleotide 2362.

### SEQ ID No. 90:

[0383] Amino acid sequence of mutated Homo sapiens BRAF, mutation BRAF_G469R

### SEQ ID No. 91:

[0384] Nucleotide sequence encoding mutated Homo sapiens BRAF, mutation BRAF_G469R. The coding region ranges from nucleotide 62 to nucleotide 2362.

### SEQ ID No. 92:

[0385] Amino acid sequence of mutated Homo sapiens BRAF, mutation BRAF_G469R.

### SEQ ID No. 93:

[0386] Nucleotide sequence encoding mutated Homo sapiens BRAF, mutation BRAF_G469S. The coding region ranges from nucleotide 62 to nucleotide 2362.

### SEQ ID No. 94:

[0387] Amino acid sequence of mutated Homo sapiens BRAF, mutation BRAF_G469S

### SEQ ID No. 95:

[0388] Nucleotide sequence encoding mutated Homo sapiens BRAF, mutation BRAF_G464E. The coding region ranges from nucleotide 62 to nucleotide 2362.

### SEQ ID No. 96:

[0389] Amino acid sequence of mutated Homo sapiens BRAF, mutation BRAF_G464E

### SEQ ID No. 97:

[0390] Nucleotide sequence encoding mutated Homo sapiens BRAF, mutation BRAF_G466V. The coding region ranges from nucleotide 62 to nucleotide 2362.

### SEQ ID No. 98:

[0391] Amino acid sequence of mutated Homo sapiens BRAF, mutation BRAF_G466V

### SEQ ID No. 99:

[0392] Nucleotide sequence encoding mutated Homo sapiens BRAF, mutation BRAF_G466E. The coding region ranges from nucleotide 62 to nucleotide 2362.

### SEQ ID No. 100:

[0393] Amino acid sequence of mutated Homo sapiens BRAF, mutation BRAF_G466E

### SEQ ID No. 101:

[0394] Nucleotide sequence encoding mutated Homo sapiens BRAF, mutation BRAF_G469A. The coding region ranges from nucleotide 62 to nucleotide 2362.

### SEQ ID No. 102:

[0395] Amino acid sequence of mutated Homo sapiens BRAF, mutation BRAF_G469A

### SEQ ID No. 103:

[0396] Nucleotide sequence encoding mutated Homo sapiens BRAF, mutation BRAF_G469E. The coding region ranges from nucleotide 62 to nucleotide 2362.

### SEQ ID No. 104:

[0397] Amino acid sequence of mutated Homo sapiens BRAF, mutation BRAF_G469E

### SEQ ID No. 105:

[0398] Nucleotide sequence encoding mutated Homo sapiens BRAF, mutation BRAF_G469V. The coding region ranges from nucleotide 62 to nucleotide 2362.

### SEQ ID No. 106:

[0399] Amino acid sequence of mutated Homo sapiens BRAF, mutation BRAF_{—}0469V

### SEQ ID No. 107:

[0400] Nucleotide sequence encoding mutated Homo sapiens BRAF, mutation BRAF_F595L. The coding region ranges from nucleotide 62 to nucleotide 2362.

### SEQ ID No. 108:

[0401] Amino acid sequence of mutated Homo sapiens BRAF, mutation BRAF_F595L

### SEQ ID No. 109:

[0402] Nucleotide sequence encoding mutated Homo sapiens BRAF, mutation BRAF_G596R. The coding region ranges from nucleotide 62 to nucleotide 2362.

### SEQ ID No. 110:

[0403] Amino acid sequence of mutated Homo sapiens BRAF, mutation BRAF_G596R

### SEQ ID No. 111:

[0404] Nucleotide sequence encoding mutated Homo sapiens BRAF, mutation BRAF_L597V. The coding region ranges from nucleotide 62 to nucleotide 2362.

### SEQ ID No. 112:

[0405] Amino acid sequence of mutated Homo sapiens BRAF, mutation BRAF_L597V

### SEQ ID No. 113:

[0406] Nucleotide sequence encoding mutated Homo sapiens BRAF, mutation BRAF_L597S. The coding region ranges from nucleotide 62 to nucleotide 2362.

### SEQ ID No. 114:

[0407] Amino acid sequence of mutated Homo sapiens BRAF, mutation BRAF_L597S

### SEQ ID No. 115:

[0408] Nucleotide sequence encoding mutated Homo sapiens BRAF, mutation BRAF_V600E. The coding region ranges from nucleotide 62 to nucleotide 2362.

### SEQ ID No. 116:

[0409] Amino acid sequence of mutated Homo sapiens BRAF, mutation BRAF_V600E

### SEQ ID No. 117:

[0410] Nucleotide sequence encoding mutated Homo sapiens BRAF, mutation BRAF_V600K. The coding region ranges from nucleotide 62 to nucleotide 2362.

### SEQ ID No. 118:

[0411] Amino acid sequence of mutated Homo sapiens BRAF, mutation BRAF_V600K

### SEQ ID No. 119:

[0412] Nucleotide sequence encoding mutated Homo sapiens BRAF, mutation BRAF_V600R. The coding region ranges from nucleotide 62 to nucleotide 2362.

### SEQ ID No. 120:

[0413] Amino acid sequence of mutated Homo sapiens BRAF, mutation BRAF_V600R

### SEQ ID No. 121:

[0414] Nucleotide sequence encoding mutated Homo sapiens BRAF, mutation BRAF_K601N. The coding region ranges from nucleotide 62 to nucleotide 2362.

### SEQ ID No. 122:

[0415] Amino acid sequence of mutated Homo sapiens BRAF, mutation BRAF_K601N

### SEQ ID No. 123:

[0416] Nucleotide sequence encoding mutated Homo sapiens BRAF, mutation BRAF_K601E. The coding region ranges from nucleotide 62 to nucleotide 2362.

### SEQ ID No. 124:

[0417] Amino acid sequence of mutated Homo sapiens BRAF, mutation BRAF_K601E

### SEQ ID No. 125:

[0418] Nucleotide sequence encoding mutated Homo sapiens BRAF, mutation BRAF_D594G. The coding region ranges from nucleotide 62 to nucleotide 2362.

### SEQ ID No. 126:

[0419] Amino acid sequence of mutated Homo sapiens BRAF, mutation BRAF_D594G

### SEQ ID No. 127:

[0420] Nucleotide sequence encoding mutated Homo sapiens BRAF, mutation BRAF_D594V. The coding region ranges from nucleotide 62 to nucleotide 2362.

### SEQ ID No. 128:

[0421] Amino acid sequence of mutated Homo sapiens BRAF, mutation BRAF_D594V

### SEQ ID No. 129:

[0422] Nucleotide sequence encoding mutated Homo sapiens BRAF, mutation BRAF_L597R. The coding region ranges from nucleotide 62 to nucleotide 2362.

### SEQ ID No. 130:

[0423] Amino acid sequence of mutated Homo sapiens BRAF, mutation BRAF_L597R

### SEQ ID No. 131:

[0424] Nucleotide sequence encoding mutated Homo sapiens BRAF, mutation BRAF_L597Q. The coding region ranges from nucleotide 62 to nucleotide 2362.

### SEQ ID No. 132:

[0425] Amino acid sequence of mutated Homo sapiens BRAF, mutation BRAF_L597Q.

### SEQ ID No. 133:

[0426] Nucleotide sequence encoding mutated Homo sapiens BRAF, mutation BRAF_T599I. The coding region ranges from nucleotide 62 to nucleotide 2362.

### SEQ ID No. 134:

[0427] Amino acid sequence of mutated Homo sapiens BRAF, mutation BRAF_T599I

### SEQ ID No. 135:

[0428] Nucleotide sequence encoding mutated Homo sapiens BRAF, mutation BRAF_V6001. The coding region ranges from nucleotide 62 to nucleotide 2362.

### SEQ ID No. 136:

[0429] Amino acid sequence of mutated Homo sapiens BRAF, mutation BRAF_V600L

### SEQ ID No. 137:

[0430] Nucleotide sequence encoding Homo sapiens heat shock protein 90 kDa alpha (cytosolic), class A member 1 (HSP90AA1/HSP90), transcript variant 1, mRNA (>gi|153792589|ref|NM_{—}001017963.2|)

### SEQ ID No. 138:

[0431] Amino acid sequence of Homo sapiens heat shock protein 90 kDa alpha (cytosolic), class A member 1 isoform 1 (HSP90AA1) (>gi|153792590|ret|NP_{—}001017963.2|)

### SEQ ID No. 139:

[0432] Nucleotide sequence encoding Homo sapiens heat shock protein 90 kDa alpha (cytosolic), class A member 1 (HSP90AA1), transcript variant 2, mRNA (>gi|154146190|ref|NM_{—}005348.3|)

### SEQ ID No. 140:

[0433] Amino acid sequence of Homo sapiens heat shock protein 90 kDa alpha (cytosolic), class A member isoform 2 (>gi|154146191|ref|NP_{—}005339.3|)

### SEQ ID No. 141:

[0434] Nucleotide sequence encoding Homo sapiens heat shock protein 90 kDa alpha (cytosolic), class B member 1 (HSP90AB1), mRNA (>gi|20149593|ref|NM_{—}007355.21) mRNA

### SEQ ID No. 142:

[0435] Amino acid sequence of Homo sapiens heat shock 90 kDa protein 1, beta (>gi|20149594ref|NP_{—}031381.2|)

### SEQ ID No. 143:

[0436] Nucleotide sequence encoding Homo sapiens heat shock protein 90 kDa beta (Grp94), member 1 (HSP90B1), mRNA (>gi|4507676|ref|NM_{—}003299.1|)

### SEQ ID No. 144:

[0437] Amino acid sequence of Homo sapiens heat shock protein 90 kDa beta, member 1 (>gi|4507677|ref|NP_{—}003290.1|).

### SEQ ID No. 145:

[0438] Nucleotide sequence encoding Homo sapiens heat shock protein 90 kDa alpha (cytosolic), class A member 2 (HSP90AA2), mRNA (>gi|92859629|ref|NM_{—}001040141.1|)

### SEQ ID No. 146:

[0439] Amino acid sequence of Homo sapiens heat shock 90 kDa protein 1, alpha-like 3 (>gi|92859630|ref|NP_{—}001035231.1|)

### SEQ ID No. 147:

[0440] Nucleotide sequence encoding Homo sapiens v-raf murine sarcoma viral oncogene homolog B1 (BRAF). mRNA >gi|187608632|ref|NM_{—}004333.4|). The coding region ranges from nucleotide 62 to nucleotide 2362.

### SEQ ID No. 148:

[0441] Amino acid sequence of Homo sapiens v-raf murine sarcoma viral oncogene homolog B1 (BRAF), mRNA >gi|87608632|ref|NM_{—}004333.4|).

### SEQ ID No. 149:

[0442] Nucleotide sequence encoding Homo sapiens epidermal growth factor receptor (erythroblastic leukemia viral (v-erb-b) oncogene homolog, avian) (EGFR), transcript variant 1 (isoform a), mRNA (>gi|41327737|ref|NM_{—}005228.3|). The coding region ranges from nucleotide 247 to nucleotide 3879.

### SEQ ID No. 150:

[0443] Amino acid sequence of Homo sapiens epidermal growth factor receptor (erythroblastic leukemia viral (v-erb-b) oncogene homolog, avian) (EGFR), (isoform a).

### SEQ ID No. 151:

[0444] Nucleotide sequence encoding Homo sapiens epidermal growth factor receptor (erythroblastic leukemia viral (v-erb-b) oncogene homolog, avian) (EGFR), transcript variant 2 (isoform h), mRNA (>|NM_{—}201282.1|). The coding region ranges from nucleotide 247 to nucleotide 2133.

### SEQ ID No. 152:

[0445] Amino acid sequence of Homo sapiens epidermal growth factor receptor (erythroblastic leukemia viral (v-erb-b) oncogene homolog, avian) (EGFR), (isoform b).

### SEQ ID No. 153:

[0446] Nucleotide sequence encoding Homo sapiens epidermal growth factor receptor (erythroblastic leukemia viral (v-erb-b) oncogene homolog, avian) (EGFR), transcript variant 3 (isoform c). mRNA (>|NM_{—}201283.3|). The coding region ranges from nucleotide 247 to nucleotide 1464.

### SEQ ID No. 154:

[0447] Amino acid sequence of Homo sapiens epidermal growth factor receptor (erythroblastic leukemia viral (v-erb-b) oncogene homolog, avian) (EGFR), (isoform c).

### SEQ ID No. 155:

[0448] Nucleotide sequence encoding Homo sapiens epidermal growth factor receptor (erythroblastic leukemia viral (v-erb-b) oncogene homolog, avian) (EGFR), transcript variant 1 (isoform d), mRNA (>|NM_{—}201284.3|). The coding region ranges from nucleotide 247 to nucleotide 2364.

### SEQ ID No. 156:

[0449] Amino acid sequence of Homo sapiens epidermal growth factor receptor (erythroblastic leukemia viral (v-erb-b) oncogene homolog, avian) (EGFR), (isoform d).

### SEQ ID No. 157:

[0450] Nucleotide sequence encoding Homo sapiens v-Ki-ras2 Kirsten rat sarcoma viral oncogene homolog (KRAS), transcript variant a (isoform a), mRNA (|NM_{—}33360.2|). The coding region ranges from nucleotide 182 to nucleotide 751.

### SEQ ID No. 158:

[0451] Amino acid sequence of Homo sapiens v-Ki-ras2 Kirsten rat sarcoma viral oncogene homolog (KRAS) (isoform a).

### REFERENCES CITED HEREIN

[0452] Arao T et al., Small in-frame deletion in the epidermal growth factor receptor as a target for ZD6474. Cancer Res 64: 9101-4 (2004).
[0453] Aviel-Ronen S et al., K-ras mutations in non-small-cell lung carcinoma: a review. Clin Lung Cancer 8: 30-8 (2006).
[0454] Bamford S et al., The COSMIC (Catalogue of Somatic Mutations in Cancer) database and website. Br J Cancer 91: 355-8 (2004).
[0455] Banerji U et al., BRAF and NRAS mutations in melanoma: potential relationships to clinical response to HSP90 inhibitors. Mol Cancer Ther 7: 737-9 (2008).
[0456] Basso A D et al., Akt forms an intracellular complex with heat shock protein 90 (Hsp90) and Cdc37 and is destabilized by inhibitors of Hsp90 function. J Biol Chem 277: 39858-66 (2002).
[0457] Beroukhim R et al., Assessing the significance of chromosomal aberrations in cancer: methodology and application to glioma. Proc Natl Acad Sci USA 104: 20007-12 (2007).
[0458] Bhattacharjee A et al., Classification of human lung carcinomas by mRNA expression profiling reveals distinct adenocarcinoma subclasses. Proc Natl Acad Sci USA 98: 13790-5 (2001).
[0459] Bild A H et al., Oncogenic pathway signatures in human cancers as a guide to targeted therapies. Nature 439: 353-7 (2006).
[0460] Cappuzzo F et al., Epidermal growth factor receptor gene and protein and gefitinib sensitivity in non-small-cell lung cancer. J Natl Cancer Inst 97: 643-55 (2005).
[0461] Chen C F et al., Molecular genetic evidence supporting a novel human hepatocellular carcinoma tumor suppressor locus at 13q12.11. Genes Chromosomes Cancer 44: 320-8 (2005).
[0462] Choi K et al., Transcriptional profiling of non-small cell lung cancer cells with activating EGFR somatic mutations. PLoS ONE 2: e1226 (2007).
[0463] Druker B J et al., Activity of a specific inhibitor of the BCR-ABL tyrosine kinase in the blast crisis of chronic myeloid leukemia and acute lymphoblastic leukemia with the Philadelphia chromosome. N Engl J Med 344: 1038-42 (2001a).
[0464] Druker B J et al., Efficacy and safety of a specific inhibitor of the BCR-ABL tyrosine kinase in chronic myeloid leukemia. N Engl J Med 344: 1031-7 (2001b).
[0465] Eberhard D A et al., Mutations in the Epidermal Growth Factor Receptor and in KRAS Are Predictive and Prognostic Indicators in Patients With Non-Small-Cell Lung Cancer Treated With Chemotherapy Alone and in Combination With Erlotinib. J Clin Oncol (2005a).
[0466] Eberhard D A et al., Mutations in the epidermal growth factor receptor and in KRAS are predictive and prognostic indicators in patients with non-small-cell lung cancer treated with chemotherapy alone and in combination with erlotinib. J Clin Oncol 23: 5900-9 (2005b).
[0467] Garraway L A et al., Integrative genomic analyses identify MITF as a lineage survival oncogene amplified in malignant melanoma. Nature 436: 117-22 (2005).
[0468] Golub T R et al., Molecular classification of cancer: class discovery and class prediction by gene expression monitoring. Science 286: 531-7 (1999).
[0469] Grbovic O M, V600E B-Raf requires the Hsp90 chaperone for stability and is degraded in response to Hsp90 inhibitors. Proc Natl Acad Sci USA 103: 57-62 (2006).
[0470] Greshock J et al., Cancer cell lines as genetic models of their parent histology: analyses based on array comparative genomic hybridization. Cancer Res 67: 3594-600 (2007).
[0471] Greulich H et al., Oncogenic Transformation by Inhibitor-Sensitive and -Resistant EGFR Mutants. PLoS Med 2: e313 (2005).
[0472] Heinrich M C et al., Kinase mutations and imatinib response in patients with metastatic gastrointestinal stromal tumor. J Clin Oncol 21: 4342-9 (2003).
[0473] Hirsch F R et al., Increased epidermal growth factor receptor gene copy number detected by fluorescence in situ hybridization associates with increased sensitivity to gefitinib in patients with bronchioloalveolar carcinoma subtypes: a Southwest Oncology Group Study. J Clin Oncol 23: 6838-45 (2005).
[0474] Hostein I et al., Inhibition of signal transduction by the Hsp90 inhibitor 17-allylamino-17-demethoxygeldanamycin results in cytostasis and apoptosis. Cancer Res 61: 4003-9 (2001).
[0475] Hummel M et al., A biologic definition of Burkitt's lymphoma from transcriptional and genomic profiling N Engl J Med 354: 2419-30 (2006).
[0476] Hupe P et al., Analysis of array CGH data: from signal ratio to gain and loss of DNA regions. Bioinformatics 20: 3413-22 (2004).
[0477] Jong K et al., Cross-platform array comparative genomic hybridization meta-analysis separates hematopoietic and mesenchymal from epithelial tumors. Oncogene 26: 1499-506 (2007).
[0478] Karaman M W et al., Herrgard S. Treiber D K, Gallant P. Atteridge C E, Campbell B T et al (2008). A quantitative analysis of kinase inhibitor selectivity. Nat Biotechnol 26: 127-32 (2008).
[0479] Kaye F J A curious link between epidermal growth factor receptor amplification and survival: effect of “allele dilution” on gefitinib sensitivity? J Natl Cancer Inst 97: 621-3 (2005).
[0480] Kendall J et al., Oncogenic cooperation and coamplification of developmental transcription factor genes in lung cancer. Proc Natl. Acad Sci USA 104: 16663-8 (2007).
[0481] Knowles P P et al., Structure and chemical inhibition of the RET tyrosine kinase domain. J Biol Chem 281: 33577-87 (2006).
[0482] Kobayashi S et al., EGFR mutation and resistance of non-small-cell lung cancer to gefitinib. N Engl J Med 352: 786-92 (2005).
[0483] Lamb J et al., A mechanism of cyclin D1 action encoded in the patterns of gene expression in human cancer. Cell 114: 323-34 (2003).
[0484] Lenburg M E et al., Previously unidentified changes in renal cell carcinoma gene expression identified by parametric analysis of microarray data. BMC Cancer 3: 31 (2003).
[0485] Lin W M et al., Modeling genomic diversity and tumor dependency in malignant melanoma Cancer Res 68: 664-73 (2008).
[0486] Lockwood W W et al., DNA amplification is a ubiquitous mechanism of oncogene activation in lung and other cancers. Oncogene. (2008).
[0487] Lu Y et al., A gene expression signature predicts survival of patients with stage I non-small cell lung cancer. PLoS Med 3: e467 (2006).
[0488] Lynch T J et al., Activating mutations in the epidermal growth factor receptor underlying responsiveness of non-small-cell lung cancer to gefitinib. N Engl J Med 350: 2129-39 (2004).
[0489] McDermott U et al., Identification of genotype-correlated sensitivity to selective kinase inhibitors by using high-throughput tumor cell line profiling. Proc Natl Acad Sci USA 104: 19936-41 (2007).
[0490] Neve R M et al., A collection of breast cancer cell lines for the study of functionally distinct cancer subtypes. Cancer Cell 10: 515-27 (2006).
[0491] Nevins J R and Potti A, Mining gene expression profiles: expression signatures as cancer phenotypes. Nat Rev Genet 8: 601-9 (2007).
[0492] O'Reilly K E et al., mTOR inhibition induces upstream receptor tyrosine kinase signaling and activates Akt. Cancer Res 66: 1500-8 (2006).
[0493] Paez J G et al., EGFR mutations in lung cancer: correlation with clinical response to gefitinib therapy. Science 304: 1497-500 (2004).
[0494] Pao W et al., EGF receptor gene mutations are common in lung cancers from “never smokers” and are associated with sensitivity of tumors to gefitinib and erlotinib. Proc Natl Acad Sci USA 101: 13306-11 (2004).
[0495] Pao W et al., Acquired resistance of lung adenocarcinomas to gefitinib or erlotinib is associated with a second mutation in the EGFR kinase domain. PLoS Med 2: e73 (2005a).
[0496] Pao W et al., KRAS mutations and primary resistance of lung adenocarcinomas to gefitinib or erlotinib. PLoS Med 2: e17 (2005b).
[0497] Papadopoulos N et al., The role of companion diagnostics in the development and use of mutation-targeted cancer therapies. Nat Biotechnol 24: 985-95 (2006).
[0498] Reich M et al., GenePattern 2.0. Nat Genet. 38: 500-1 (2006).
[0499] Rinaldi A et al., Genomic and expression profiling identifies the B-cell associated tyrosine kinase Syk as a possible therapeutic target in mantle cell lymphoma. Br J Haematol 132: 303-16 (2006).
[0500] Schmid M et al., Homozygous deletions of methylthioadenosine phosphorylase (MTAP) are more frequent than p16INK4A (CDKN2) homozygous deletions in primary non-small cell lung cancers (NSCLC). Oncogene 17: 2669-75 (1998).
[0501] Shah N P et al., Overriding imatinib resistance with a novel ABL kinase inhibitor. Science 305: 399-401 (2004).
[0502] Shankavaram U T et al., Transcript and protein expression profiles of the NCI-60 cancer cell panel: an integromic microarray study. Mol Cancer Ther 6: 820-32 (2007).
[0503] Sharma S V et al., Epidermal growth factor receptor mutations in lung cancer. Nat Rev Cancer 7: 169-81 (2007).
[0504] Sharp S and Workman P, Inhibitors of the HSP90 molecular chaperone: current status. Adv Cancer Res 95: 323-48 (2006).
[0505] Shendure J et al., Advanced sequencing technologies: methods and goals Nat Rev Genet 5: 335-44 (2004).
[0506] Shimamura T et al., Non-small-cell lung cancer and Ba/F3 transformed cells harboring the ERBB2 G776insV_G/C mutation are sensitive to the dual-specific epidermal growth factor receptor and ERBB2 inhibitor HKI-272. Cancer Res 66: 6487-91 (2006).
[0507] Shoemaker R H The NCI60 human tumour cell line anticancer drug screen. Nat Rev Cancer 6: 813-23 (2006).
[0508] Slamon D J et al., Use of chemotherapy plus a monoclonal antibody against HER2 for metastatic breast cancer that overexpresses HER2. N Engl J Med 344: 783-92 (2001).
[0509] Solit D B et al., BRAD mutation predicts sensitivity to MEK inhibition. Nature 439: 358-62 (2006).
[0510] Solit D B and Rosen NHsp90: a novel target for cancer therapy. Curr Top Med Chem 6: 1205-14 (2006).
[0511] Song L et al., Dasatinib (BMS-354825) selectively induces apoptosis in lung cancer cells dependent on epidermal growth factor receptor signaling for survival. Cancer Res 66: 5542-8 (2006).
[0512] Sos M L et al., Expression of signaling mediators downstream of EGF-receptor predict sensitivity to small molecule inhibitors directed against the EGF-receptor pathway. J Thorac Oncol 3: 170-3 (2008).
[0513] Stamos J et al., Structure of the epidermal growth factor receptor kinase domain alone and in complex with a 4-anilinoquinazoline inhibitor. J Biol Chem 277: 46265-72 (2002).
[0514] Thomas R K, et al., High-throughput oncogene mutation profiling in human cancer. Nat. Genet. (2007).
[0515] Tracy S et al., Gefitinib induces apoptosis in the EGFRL858R non-small-cell lung cancer cell line H3255. Cancer Res 64: 7241-4 (2004).
[0516] Tsao M S et al., Erlotinib in lung cancer—molecular and clinical predictors of outcome. N Engl Med 353: 133-44 (2005).
[0517] Uphoff C C and Drexler H G. Eradication of mycoplasma contaminations Methods Mol Biol 290: 25-34 (2005).
[0518] Weir B A et al., Characterizing the cancer genome in lung adenocarcinoma. Nature 450: 893-8 (2007).
[0519] Yun C H et al., Structures of lung cancer-derived EGFR mutants and inhibitor complexes: mechanism of activation and insights into differential inhibitor sensitivity. Cancer Cell 11: 217-27 (2007).
[0520] Huang F et al., Identification of candidate molecular markers predicting sensitivity in solid tumors to dasatinib: rationale for patients selection. E. Cancer Res. March 1; 67(5):2226-38 (2007)
[0521] Jackson, E. L. et al., Analysis of lung tumor initiation and progression using conditional expression of oncogenic K-ras. Genes Dev 15:3243-3248 (2001)
[0522] Johnson L et al., Somatic activation of the K-ras oncogene causes early onset lung cancer in mice. Nature. 410(6832):1111-6 (2001).
[0523] Ji H. et al., LKB1 modulates lung cancer differentiation and metastasis. Nature. 448(7155):807-10. (2007)
[0524] Thomas R K et al., Sensitive mutation detection in heterogeneous cancer specimens by massively parallel picoliter reactor sequencing. Nat. Med. July; 12(7):852-5. Epub 2006 Jun. 25. Erratum in: Nat Med. 2006 October; 12(10):1220.

1. A method of selecting (a) cell(s), (a) tissue(s) or (a) cell culture(s) with susceptibility to an HSP90 inhibitor, comprising the steps:
(a) determining the presence of at least one activating mutation in the KRAS gene in said cell, tissue or cell culture; and
(b) selecting (a) cell(s), tissue(s) or cell culture(s) with at least one activating mutation in the KRAS gene.

2. The method of claim 1, further comprising the steps
(i) contacting said cell(s), tissue(s) or cell culture(s) with an HSP90 inhibitor; and
(ii) evaluating viability of said cell(s), tissue(s) or cell culture(s) contacted with an HSP90 inhibitor.

3. A method for determining the responsiveness of a mammalian tumor cell or cancer cell to treatment with an HSP90 inhibitor, said method comprising determining the presence of at least one activating mutation in the KRAS gene in said tumor cell, wherein said activating mutation is indicative of whether the cell is likely to respond or is responsive to the treatment.

4. The method of claim 3, whereby additionally an activating mutation in the EGFR and/or the BRAF gene is determined.

5. In vitro method for the identification of a responder for or a patient sensitive to an HSP90 inhibitor, said method comprising the following steps:
(a) obtaining a sample of a patient suspected to suffer from or being prone to suffer from a cancer characterized by the presence of at least one activating mutation in the KRAS gene, and, optionally, in the EGFR and/or the BRAF gene: and
(b) evaluating the presence of at least one activating mutation in the KRAS gene, and, optionally, the EGFR and/or the BRAF gene:
whereby an activating mutation in the KRAS gene alone or in addition to an activating mutation in the EGFR and/or the BRAF gene is indicative for a responding patient or is indicative for a sensitivity of said patient to an HSP90 inhibitor.

6.-8. (canceled)

9. The method of claim 5, wherein said mutation in the KRAS gene is selected from the group consisting of KRAS_G12C, KRAS_G12R, KRAS_G12D, KRAS_G12A, KRAS_G12S, KRAS_G12V, KRAS_G13D, KRAS_G13S, KRAS_G13C, KRAS_G13V, KRAS_Q61H, KRAS_Q61R, KRAS_Q61P, KRAS_Q61L, KRAS_Q61K, KRAS_Q61E, KRAS_A59T and KRAS_G12F.

10. The method of claim 5, wherein said mutation in the EGFR gene is selected from the group consisting of EGFR_D770_N771>AGG; EGFR_D770_N771insG; EGFR_D770_N771insG; EGFR_D770_N771 insN; EGFR_E709A; EGFR_E709G; EGFR_E709H, EGFR_E709K; EGFR_E709V; EGFR_E746_A750del; EGFR_E746_A750del, T751A; EGFR_E746_A750del, V ins; EGFR_E746_T751del, I ins; EGFR_E746_T751del; S752A; EGFR_E746_T751del, S752D; EGFR_E746_T751del, V ins; EGFR_G719A; EGFR_G719C; EGFR_G719S; EGFR_H773_V774insH; EGFR_H773_V774insNPH; EGFR_H773_V774insPH; EGFR_H773>NPY; EGFR_L747_E749del; EGFR_L747_E749del, A750P; EGFR_L747_S752del; EGFR_L747_S752del, P753S; EGFR_L747_S752del, Q ins; EGFR_L747_T750del, P ins; EGFR_L747_T751del; EGFR_L858R; EGFR_L861Q; EGFR_M766_A767insAI; EGFR_P772_H773insV; EGFR_S752_I759del; EGFR_S768I; EGFR_T790M; EGFR_V769_D770insASV; EGFR_V769_D770insASV; and EGFR_V774_C775insHV.

11. The method of claim 5, wherein said mutation in the BRAF gene is selected from the group consisting of BRAF_D594G, BRAF_D594V, BRAF_F468C, BRAF_F595L, BRAF_G464E, BRAF_G464R, BRAF_G464V, BRAF_G466A, BRAF_G466E, BRAF_G466R, BRAF_G466V, BRAF_G469A, BRAF_G469E, BRAF_G469R, BRAF_G469R, BRAF_G469S, BRAF_G469V, BRAF_G596R, BRAF_K601E, BRAF_K601N, BRAF_L597Q, BRAF_L597R, BRAF_L597S, BRAF_L597V, BRAF_T599I, BRAF_V600E, BRAF_V600K, BRAF_V600L, and BRAF_V600R.

12. The method of claim 5, wherein said mutation in the KRAS gene, the EGFR and/or the BRAF gene is detected by SSP, PCR-RFLP assay, real-time PCR, sequencing, HPLC or mass-spectrometric genotyping.

13. The method of claim 5, wherein said sample is obtained from a patient suspected to suffer from or being prone to suffer from cancer.

14. The method of claim 5, wherein the presence of the mutation is evaluated using an oligo- or polynucleotide capable of detecting (an) activating mutation(s) of at least one activating mutation in the KRAS gene and, optionally in the EGFR and/or in the BRAF gene.

15. The method of claim 14, wherein said oligonucleotide is about 15 to 100 nucleotides in length.

16. A method of monitoring the efficacy of a treatment of a cancer characterized by the presence of at least one activating mutation in the KRAS gene, and, optionally, in the EGFR and/or the BRAF gene in a subject/patient suffering from said disorder or being prone to suffering from said disorder comprising the steps:
a) determining in a cell or tissue sample from said subject/patient the expression or activity of KRAS, and, optionally the activity or expression level of EGFR and/or the activity or expression level of BRAF; and
b) comparing the activity of said at least one marker gene determined in a) with a reference or control expression level or reference or control activity of KRAS, and, optionally with a reference or control expression level of EGFR and/or with a reference or control expression level of BRAF,
wherein the extent of the difference between said activity or expression level determined in a) and said reference expression level or reference activity is indicative for said efficacy of a treatment of said cancer.

17. A method of predicting the efficacy of a treatment of a cancer characterized by the presence of at least one activating mutation in the KRAS gene, and, optionally, in the EGFR and/or the BRAF gene for a subject/patient suffering from said disorder or being prone to suffering from said disorder comprising the steps of
a) determining in a cell or tissue sample from said subject/patient the activity or expression level of at least one marker gene selected from the group consisting of KRAS, EGFR and/or BRAF; and
b) comparing the activity of said at least one marker gene determined in a) with a reference activity or reference expression level of said at least one marker gene, optionally determined in a cell or tissue sample obtained from a control subject/patient (responder and/or non-responder),
wherein the extent of the difference between said activity or expression level determined in a) and said reference or control activity or said reference or control expression level is indicative for the predicted efficacy of a treatment of cancer.

18. The method of claim 16, wherein said treatment of cancer characterized by the presence of at least one activating mutation in the KRAS gene, and, optionally, in the EGFR and/or the BRAF gene comprises the administration of an HSP90 inhibitor.

19. (canceled)

20. The method of claim 5, wherein said cancer is selected from the group consisting of non-small cell lung cancer, lung adenocarcinoma, pancreatic cancer, colorectal cancer, breast cancer, head and neck cancer, ovarian cancer, endometrial cancer, gastrointestinal cancer (including gastric and esophageal cancer), renal cell cancer, urinary tract carcinomas, leukemias, prostate cancer, lymphomas, melanomas, brain tumors, pediatric tumors and sarcomas.

21. A kit useful for carrying out the method of claim 3, comprising oligonucleotides or polynucleotides capable of determining the presence of at least one activating mutation in the KRAS gene, and, optionally, the EGFR gene and/or the BRAF gene.

22.-26. (canceled)

27. A method for the treatment of a patient having a KRAS positive cancer, the method comprising selecting a patient whose cancer is characterized by the presence of at least one activating mutation in the KRAS gene and treating said patient with an effective amount of an HSP90 inhibitor.

28. The method of claim 27, wherein said HSP90 inhibitor is geldanamycin or a derivative thereof.

29. The method of claim 28, wherein said geldanamycin derivative is 17-AAG or IPI-504.

30. The method of claim 27, wherein said HSP90 inhibitor is NVP-AUY922.

31. The method of claim 27, wherein said cancer is selected from the group consisting of non-small cell lung cancer, lung adenocarcinoma, pancreatic cancer, colorectal cancer, breast cancer, head and neck cancer, ovarian cancer, endometrial cancer, gastrointestinal cancer (including gastric and esophageal cancer), renal cell cancer, urinary tract carcinomas, leukemias, prostate cancer, lymphomas, melanomas, brain tumors, pediatric tumors and sarcomas.

The application's sequence listing, which the Patent Office published only in electronic form, follows.

SEQUENCE LISTING (158 sequences)

SEQ ID NO: 1 - DNA, 5312 bp, Homo sapiens
  mRNA (1)..(5312): v-Ki-ras2 Kirsten rat sarcoma viral oncogene homolog (KRAS), transcript variant b (isoform b)
  CDS (182)..(748)
ggccgcggcggcggaggcagcagcggcggcggcagtggcggcggcgaaggtggcggcggctcggccagtactcccggcccccgccatttcggactgggagcgagcgcggcgcaggcactgaaggcggcggcggggccagaggctcagcggctcccaggtgcgggagagaggcctgctgaaaatgactgaatataaacttgtggtagttggagctggtggcgtaggcaagagtgccttgacgatacagctaattcagaatcattttgtggacgaatatgatccaacaatagaggattcctacaggaagcaagtagtaattgatggagaaacctgtctcttggatattctcgacacagcaggtcaagaggagtacagtgcaatgagggaccagtacatgaggactggggagggctttctttgtgtatttgccataaataatactaaatcatttgaagatattcaccattatagagaacaaattaaaagagttaaggactctgaagatgtacctatggtcctagtaggaaataaatgtgatttgccttctagaacagtagacacaaaacaggctcaggacttagcaagaagttatggaattccttttattgaaacatcagcaaagacaagacagggtgttgatgatgccttctatacattagttcgagaaattcgaaaacataaagaaaagatgagcaaagatggtaaaaagaagaaaaagaagtcaaagacaaagtgtgtaattatgtaaatacaatttgtacttttttcttaaggcatactagtacaagtggtaatttttgtacattacactaaattattagcatttgttttagcattacctaatttttttcctgctccatgcagactgttagcttttaccttaaatgcttattttaaaatgacagtggaagtttttttttcctctaagtgccagtattcccagagttttggtttttgaactagcaatgcctgtgaaaaagaaactgaatacctaagatttctgtcttggggtttttggtgcatgcagttgattacttcttatttttcttaccaattgtgaatgttggtgtgaaacaaattaatgaagcttttgaatcatccctattctgtgttttatctagtcacataaatggattaattactaatttcagttgagaccttctaattggtttttactgaaacattgagggaacacaaatttatgggcttcctgatgatgattcttctaggcatcatgtcctatagtttgtcatccctgatgaatgtaaagttacactgttcacaaaggttttgtctcctttccactgctattagtcatggtcactctccccaaaatattatattttttctataaaaagaaaaaaatggaaaaaaattacaaggcaatggaaactattataaggccatttccttttcacattagataaattactataaagactcctaatagcttttcctgttaaggcagacccagtatgaaatggggattattatagcaaccattttggggctatatttacatgctactaaatttttataataattgaaaagattttaacaagtataaaaaattctcataggaattaaatgtagtctccctgtgtcagactgctctttcatagtataactttaaatcttttcttcaacttgagtctttgaagatagttttaattctgcttgtgacattaaaagattatttgggccagttatagcttattaggtgttgaagagaccaaggttgcaaggccaggccctgtgtgaacctttgagctttcatagagagtttcacagcatggactgtgtccccacggtcatccagtgttgtcatgcattggttagtcaaaatggggagggactagggcagtttggatagctcaacaagatacaatctcactctgtggtggtcctgctgacaaatcaagagcattgcttttgtttcttaagaaaacaaactcttttttaaaaattacttttaaatattaactcaaaagttgagattttggggtggtggtgtgccaagacattaattttttttttaaacaatgaagtgaaaaagttttacaatctctaggtttggctagttctcttaacactggttaaattaacattgcataaacacttttcaagtctgatccatatttaataatgctttaaaataaaaataaaaacaatccttttgataaatttaaaatgttacttattttaaaataaatgaagtgagatggcatggtgaggtgaaagtatcactggactaggaagaaggtgacttaggttctagataggtgtcttttaggactctgattttgaggacatcacttactatccatttcttcatgttaaaagaagtcatctcaaactcttagttttttttttttacaactatgtaatttatattccatttacataaggatacacttatttgtcaagctcagcacaatctgtaaatttttaacctatgttacaccatcttcagtgccagtcttgggcaaaattgtgcaagaggtgaagtttatatttgaatatccattctcgttttaggactcttcttccatattagtgtcatcttgcctccctaccttccacatgccccatgacttgatgcagttttaatacttgtaattcccctaaccataagatttactgctgctgtggatatctccatgaagttttcccactgagtcacatcagaaatgccctacatcttatttcctcagggctcaagagaatctgacagataccataaagggatttgacctaatcactaattttcaggtggtggctgatgctttgaacatctctttgctgcccaatccattagcgacagtaggatttttcaaacctggtatgaatagacagaaccctatccagtggaaggagaatttaataaagatagtgctgaaagaattccttaggtaatctataactaggactactcctggtaacagtaatacattccattgttttagtaaccagaaatcttcatgcaatgaaaaatactttaattcatgaagcttactttttttttttggtgtcagagtctcgctcttgtcacccaggctggaatgcagtggcgccatctcagctcactgcaacctccatctcccaggttcaagcgattctcgtgcctcggcctcctgagtagctgggattacaggcgtgtgccactacactcaactaatttttgtatttttaggagagacggggtttcaccctgttggccaggctggtctcgaactcctgacctcaagtgattcacccaccttggcctcataaacctgttttgcagaactcatttattcagcaaatatttattgagtgcctaccagatgccagtcaccgcacaaggcactgggtatatggtatccccaaacaagagacataatcccggtccttaggtagtgctagtgtggtctgtaatatcttactaaggcctttggtatacgacccagagataacacgatgcgtattttagttttgcaaagaaggggtttggtctctgtgccagctctataattgttttgctacgattccactgaaactcttcgatcaagctactttatgtaaatcacttcattgttttaaaggaataaacttgattatattgtttttttatttggcataactgtgattcttttaggacaattactgtacacattaaggtgtatgtcagatattcatattgacccaaatgtgtaatattccagttttctctgcataagtaattaaaatatacttaaaaattaatagttttatctgggtacaaataaacaggtgcctgaactagttcacagacaaggaaacttctatgtaaaaatcactatgatttctgaattgctatgtgaaactacagatctttggaacactgtttaggtagggtgttaagacttacacagtacctcgtttctacacagagaaagaaatggccatacttcaggaactgcagtgcttatgaggggatatttaggcctcttgaatttttgatgtagatgggcatttttttaaggtagtggttaattacctttatgtgaactttgaatggtttaacaaaagatttgtttttgtagagattttaaagggggagaattctagaaataaatgttacctaattattacagccttaaagacaaaaatccttgttgaagtttttttaaaaaaagctaaattacatagacttaggcattaacatgtttgtggaagaatatagcagacgtatattgtatcatttgagtgaatgttcccaagtaggcattctaggctctatttaactgagtcacactgcataggaatttagaacctaacttttataggttatcaaaactgttgtcaccattgcacaattttgtcctaatatatacatagaaactttgtggggcatgttaagttacagtttgcacaagttcatctcatttgtattccattgattttttttttcttctaaacattttttcttcaaacagtatataactttttttaggggatttttttttagacagcaaaaactatctgaagatttccatttgtcaaaaagtaatgatttcttgataattgtgtagtaatgttttttagaacccagcagttaccttaaagctgaatttatatttagtaacttctgtgttaatactggatagcatgaattctgcattgagaaactgaatagctgtcataaaatgaaactttctttctaaagaaagatactcacatgagttcttgaagaatagtcataactagattaagatctgtgttttagtttaatagtttgaagtgcctgtttgggataatgataggtaatttagatgaatttaggggaaaaaaaagttatctgcagatatgttgagggcccatctctccccccacacccccacagagctaactgggttacagtgttttatccgaaagtttccaattccactgtcttgtgttttcatgttgaaaatacttttgcatttttcctttgagtgccaatttcttactagtactatttcttaatgtaacatgtttacctggaatgtattttaactatttttgtatagtgtaaactgaaacatgcacattttgtacattgtgctttcttttgtgggacatatgcagtgtgatccagttgttttccatcatttggttgcgctgacctaggaatgttggtcatatcaaacattaaaaatgaccactcttttaattgaaattaacttttaaatgtttataggagtatgtgctgtgaagtgatctaaaatttgtaatatttttgtcatgaactgtactactcctaattattgtaatgtaataaaaatagttacagtgacaaaaaaaaaaaaaaa

SEQ ID NO: 2 - protein, 188 aa, Homo sapiens [sequence omitted]

SEQ ID NO: 3 - DNA, 5436 bp, Artificial sequence
  /note="Description of Artificial Sequence: mutated Homo sapiens v-Ki-ras2 Kirsten rat sarcoma viral oncogene homolog (KRAS), transcript variant a, mutation KRAS_G12V"
  CDS (182)..(751)
ggccgcggcggcggaggcagcagcggcggcggcagtggcggcggcgaaggtggcggcggctcggccagtactcccggcccccgccatttcggactgggagcgagcgcggcgcaggcactgaaggcggcggcggggccagaggctcagcggctcccaggtgcgggagagaggcctgctgaaaatgactgaatataaacttgtggtagttggagctgttggcgtaggcaagagtgccttgacgatacagctaattcagaatcattttgtggacgaatatgatccaacaatagaggattcctacaggaagcaagtagtaattgatggagaaacctgtctcttggatattctcgacacagcaggtcaagaggagtacagtgcaatgagggaccagtacatgaggactggggagggctttctttgtgtatttgccataaataatactaaatcatttgaagatattcaccattatagagaacaaattaaaagagttaaggactctgaagatgtacctatggtcctagtaggaaataaatgtgatttgccttctagaacagtagacacaaaacaggctcaggacttagcaagaagttatggaattccttttattgaaacatcagcaaagacaagacagagagtggaggatgctttttatacattggtgagggagatccgacaatacagattgaaaaaaatcagcaaagaagaaaagactcctggctgtgtgaaaattaaaaaatgcattataatgtaatctgggtgttgatgatgccttctatacattagttcgagaaattcgaaaacataaagaaaagatgagcaaagatggtaaaaagaagaaaaagaagtcaaagacaaagtgtgtaattatgtaaatacaatttgtacttttttcttaaggcatactagtacaagtggtaatttttgtacattacactaaattattagcatttgttttagcattacctaatttttttcctgctccatgcagactgttagcttttaccttaaatgcttattttaaaatgacagtggaagtttttttttcctctaagtgccagtattcccagagttttggtttttgaactagcaatgcctgtgaaaaagaaactgaatacctaagatttctgtcttggggtttttggtgcatgcagttgattacttcttatttttcttaccaattgtgaatgttggtgtgaaacaaattaatgaagcttttgaatcatccctattctgtgttttatctagtcacataaatggattaattactaatttcagttgagaccttctaattggtttttactgaaacattgagggaacacaaatttatgggcttcctgatgatgattcttctaggcatcatgtcctatagtttgtcatccctgatgaatgtaaagttacactgttcacaaaggttttgtctcctttccactgctattagtcatggtcactctccccaaaatattatattttttctataaaaagaaaaaaatggaaaaaaattacaaggcaatggaaactattataaggccatttccttttcacattagataaattactataaagactcctaatagcttttcctgttaaggcagacccagtatgaaatggggattattatagcaaccattttggggctatatttacatgctactaaatttttataataattgaaaagattttaacaagtataaaaaattctcataggaattaaatgtagtctccctgtgtcagactgctctttcatagtataactttaaatcttttcttcaacttgagtctttgaagatagttttaattctgcttgtgacattaaaagattatttgggccagttatagcttattaggtgttgaagagaccaaggttgcaaggccaggccctgtgtgaacctttgagctttcatagagagtttcacagcatggactgtgtccccacggtcatccagtgttgtcatgcattggttagtcaaaatggggagggactagggcagtttggatagctcaacaagatacaatctcactctgtggtggtcctgctgacaaatcaagagcattgcttttgtttcttaagaaaacaaactcttttttaaaaattacttttaaatattaactcaaaagttgagattttggggtggtggtgtgccaagacattaattttttttttaaacaatgaagtgaaaaagttttacaatctctaggtttggctagttctcttaacactggttaaattaacattgcataaacacttttcaagtctgatccatatttaataatgctttaaaataaaaataaaaacaatccttttgataaatttaaaatgttacttattttaaaataaatgaagtgagatggcatggtgaggtgaaagtatcactggactaggaagaaggtgacttaggttctagataggtgtcttttaggactctgattttgaggacatcacttactatccatttcttcatgttaaaagaagtcatctcaaactcttagttttttttttttacaactatgtaatttatattccatttacataaggatacacttatttgtcaagctcagcacaatctgtaaatttttaacctatgttacaccatcttcagtgccagtcttgggcaaaattgtgcaagaggtgaagtttatatttgaatatccattctcgttttaggactcttcttccatattagtgtcatcttgcctccctaccttccacatgccccatgacttgatgcagttttaatacttgtaattcccctaaccataagatttactgctgctgtggatatctccatgaagttttcccactgagtcacatcagaaatgccctacatcttatttcctcagggctcaagagaatctgacagataccataaagggatttgacctaatcactaattttcaggtggtggctgatgctttgaacatctctttgctgcccaatccattagcgacagtaggatttttcaaacctggtatgaatagacagaaccctatccagtggaaggagaatttaataaagatagtgctgaaagaattccttaggtaatctataactaggactactcctggtaacagtaatacattccattgttttagtaaccagaaatcttcatgcaatgaaaaatactttaattcatgaagcttactttttttttttggtgtcagagtctcgctcttgtcacccaggctggaatgcagtggcgccatctcagctcactgcaacctccatctcccaggttcaagcgattctcgtgcctcggcctcctgagtagctgggattacaggcgtgtgccactacactcaactaatttttgtatttttaggagagacggggtttcaccctgttggccaggctggtctcgaactcctgacctcaagtgattcacccaccttggcctcataaacctgttttgcagaactcatttattcagcaaatatttattgagtgcctaccagatgccagtcaccgcacaaggcactgggtatatggtatccccaaacaagagacataatcccggtccttaggtagtgctagtgtggtctgtaatatcttactaaggcctttggtatacgacccagagataacacgatgcgtattttagttttgcaaagaaggggtttggtctctgtgccagctctataattgttttgctacgattccactgaaactcttcgatcaagctactttatgtaaatcacttcattgttttaaaggaataaacttgattatattgtttttttatttggcataactgtgattcttttaggacaattactgtacacattaaggtgtatgtcagatattcatattgacccaaatgtgtaatattccagttttctctgcataagtaattaaaatatacttaaaaattaatagttttatctgggtacaaataaacaggtgcctgaactagttcacagacaaggaaacttctatgtaaaaatcactatgatttctgaattgctatgtgaaactacagatctttggaacactgtttaggtagggtgttaagacttacacagtacctcgtttctacacagagaaagaaatggccatacttcaggaactgcagtgcttatgaggggatatttaggcctcttgaatttttgatgtagatgggcatttttttaaggtagtggttaattacctttatgtgaactttgaatggtttaacaaaagatttgtttttgtagagattttaaagggggagaattctagaaataaatgttacctaattattacagccttaaagacaaaaatccttgttgaagtttttttaaaaaaagctaaattacatagacttaggcattaacatgtttgtggaagaatatagcagacgtatattgtatcatttgagtgaatgttcccaagtaggcattctaggctctatttaactgagtcacactgcataggaatttagaacctaacttttataggttatcaaaactgttgtcaccattgcacaattttgtcctaatatatacatagaaactttgtggggcatgttaagttacagtttgcacaagttcatctcatttgtattccattgattttttttttcttctaaacattttttcttcaaacagtatataactttttttaggggatttttttttagacagcaaaaactatctgaagatttccatttgtcaaaaagtaatgatttcttgataattgtgtagtaatgttttttagaacccagcagttaccttaaagctgaatttatatttagtaacttctgtgttaatactggatagcatgaattctgcattgagaaactgaatagctgtcataaaatgaaactttctttctaaagaaagatactcacatgagttcttgaagaatagtcataactagattaagatctgtgttttagtttaatagtttgaagtgcctgtttgggataatgataggtaatttagatgaatttaggggaaaaaaaagttatctgcagatatgttgagggcccatctctccccccacacccccacagagctaactgggttacagtgttttatccgaaagtttccaattccactgtcttgtgttttcatgttgaaaatacttttgcatttttcctttgagtgccaatttcttactagtactatttcttaatgtaacatgtttacctggaatgtattttaactatttttgtatagtgtaaactgaaacatgcacattttgtacattgtgctttcttttgtgggacatatgcagtgtgatccagttgttttccatcatttggttgcgctgacctaggaatgttggtcatatcaaacattaaaaatgaccactcttttaattgaaattaacttttaaatgtttataggagtatgtgctgtgaagtgatctaaaatttgtaatatttttgtcatgaactgtactactcctaattattgtaatgtaataaaaatagttacagtgacaaaaaaaaaaaaaaa

SEQ ID NO: 4 - protein, 189 aa, Artificial sequence
  Synthetic Construct
MTEYKLVVVGAVGVGKSALTIQLIQNHFVDEYDPTIEDSYRKQVVIDGETCLLDILDTAGQEEYSAMRDQYMRTGEGFLCVFAINNTKSFEDIHHYREQIKRVKDSEDVPMVLVGNKCDLPSRTVDTKQAQDLARSYGIPFIETSAKTRQRVEDAFYTLVREIRQYRLKKISKEEKTPGCVKIKKCIIM

SEQ ID NO: 5 - DNA, 5436 bp, Artificial sequence
  /note="Description of Artificial Sequence: mutated Homo sapiens v-Ki-ras2 Kirsten rat sarcoma viral oncogene homolog (KRAS), transcript variant a, mutation KRAS_G12S"
  CDS (182)..(751)
ggccgcggcggcggaggcagcagcggcggcggcagtggcggcggcgaaggtggcggcggctcggccagtactcccggcccccgccatttcggactgggagcgagcgcggcgcaggcactgaaggcggcggcggggccagaggctcagcggctcccaggtgcgggagagaggcctgctgaaaatgactgaatataaacttgtggtagttggagctagtggcgtaggcaagagtgccttgacgatacagctaattcagaatcattttgtggacgaatatgatccaacaatagaggattcctacaggaagcaagtagtaattgatggagaaacctgtctcttggatattctcgacacagcaggtcaagaggagtacagtgcaatgagggaccagtacatgaggactggggagggctttctttgtgtatttgccataaataatactaaatcatttgaagatattcaccattatagagaacaaattaaaagagttaaggactctgaagatgtacctatggtcctagtaggaaataaatgtgatttgccttctagaacagtagacacaaaacaggctcaggacttagcaagaagttatggaattccttttattgaaacatcagcaaagacaagacagagagtggaggatgctttttatacattggtgagggagatccgacaatacagattgaaaaaaatcagcaaagaagaaaagactcctggctgtgtgaaaattaaaaaatgcattataatgtaatctgggtgttgatgatgccttctatacattagttcgagaaattcgaaaacataaagaaaagatgagcaaagatggtaaaaagaagaaaaagaagtcaaagacaaagtgtgtaattatgtaaatacaatttgtacttttttcttaaggcatactagtacaagtggtaatttttgtacattacactaaattattagcatttgttttagcattacctaatttttttcctgctccatgcagactgttagcttttaccttaaatgcttattttaaaatgacagtggaagtttttttttcctctaagtgccagtattcccagagttttggtttttgaactagcaatgcctgtgaaaaagaaactgaatacctaagatttctgtcttggggtttttggtgcatgcagttgattacttcttatttttcttaccaattgtgaatgttggtgtgaaacaaattaatgaagcttttgaatcatccctattctgtgttttatctagtcacataaatggattaattactaatttcagttgagaccttctaattggtttttactgaaacattgagggaacacaaatttatgggcttcctgatgatgattcttctaggcatcatgtcctatagtttgtcatccctgatgaatgtaaagttacactgttcacaaaggttttgtctcctttccactgctattagtcatggtcactctccccaaaatattatattttttctataaaaagaaaaaaatggaaaaaaattacaaggcaatggaaactattataaggccatttccttttcacattagataaattactataaagactcctaatagcttttcctgttaaggcagacccagtatgaaatggggattattatagcaaccattttggggctatatttacatgctactaaatttttataataattgaaaagattttaacaagtataaaaaattctcataggaattaaatgtagtctccctgtgtcagactgctctttcatagtataactttaaatcttttcttcaacttgagtctttgaagatagttttaattctgcttgtgacattaaaagattatttgggccagttatagcttattaggtgttgaagagaccaaggttgcaaggccaggccctgtgtgaacctttgagctttcatagagagtttcacagcatggactgtgtccccacggtcatccagtgttgtcatgcattggttagtcaaaatggggagggactagggcagtttggatagctcaacaagatacaatctcactctgtggtggtcctgctgacaaatcaagagcattgcttttgtttcttaagaaaacaaactcttttttaaaaattacttttaaatattaactcaaaagttgagattttggggtggtggtgtgccaagacattaattttttttttaaacaatgaagtgaaaaagttttacaatctctaggtttggctagttctcttaacactggttaaattaacattgcataaacacttttcaagtctgatccatatttaataatgctttaaaataaaaataaaaacaatccttttgataaatttaaaatgttacttattttaaaataaatgaagtgagatggcatggtgaggtgaaagtatcactggactaggaagaaggtgacttaggttctagataggtgtcttttaggactctgattttgaggacatcacttactatccatttcttcatgttaaaagaagtcatctcaaactcttagttttttttttttacaactatgtaatttatattccatttacataaggatacacttatttgtcaagctcagcacaatctgtaaatttttaacctatgttacaccatcttcagtgccagtcttgggcaaaattgtgcaagaggtgaagtttatatttgaatatccattctcgttttaggactcttcttccatattagtgtcatcttgcctccctaccttccacatgccccatgacttgatgcagttttaatacttgtaattcccctaaccataagatttactgctgctgtggatatctccatgaagttttcccactgagtcacatcagaaatgccctacatcttatttcctcagggctcaagagaatctgacagataccataaagggatttgacctaatcactaattttcaggtggtggctgatgctttgaacatctctttgctgcccaatccattagcgacagtaggatttttcaaacctggtatgaatagacagaaccctatccagtggaaggagaatttaataaagatagtgctgaaagaattccttaggtaatctataactaggactactcctggtaacagtaatacattccattgttttagtaaccagaaatcttcatgcaatgaaaaatactttaattcatgaagcttactttttttttttggtgtcagagtctcgctcttgtcacccaggctggaatgcagtggcgccatctcagctcactgcaacctccatctcccaggttcaagcgattctcgtgcctcggcctcctgagtagctgggattacaggcgtgtgccactacactcaactaatttttgtatttttaggagagacggggtttcaccctgttggccaggctggtctcgaactcctgacctcaagtgattcacccaccttggcctcataaacctgttttgcagaactcatttattcagcaaatatttattgagtgcctaccagatgccagtcaccgcacaaggcactgggtatatggtatccccaaacaagagacataatcccggtccttaggtagtgctagtgtggtctgtaatatcttactaaggcctttggtatacgacccagagataacacgatgcgtattttagttttgcaaagaaggggtttggtctctgtgccagctctataattgttttgctacgattccactgaaactcttcgatcaagctactttatgtaaatcacttcattgttttaaaggaataaacttgattatattgtttttttatttggcataactgtgattcttttaggacaattactgtacacattaaggtgtatgtcagatattcatattgacccaaatgtgtaatattccagttttctctgcataagtaattaaaatatacttaaaaattaatagttttatctgggtacaaataaacaggtgcctgaactagttcacagacaaggaaacttctatgtaaaaatcactatgatttctgaattgctatgtgaaactacagatctttggaacactgtttaggtagggtgttaagacttacacagtacctcgtttctacacagagaaagaaatggccatacttcaggaactgcagtgcttatgaggggatatttaggcctcttgaatttttgatgtagatgggcatttttttaaggtagtggttaattacctttatgtgaactttgaatggtttaacaaaagatttgtttttgtagagattttaaagggggagaattctagaaataaatgttacctaattattacagccttaaagacaaaaatccttgttgaagtttttttaaaaaaagctaaattacatagacttaggcattaacatgtttgtggaagaatatagcagacgtatattgtatcatttgagtgaatgttcccaagtaggcattctaggctctatttaactgagtcacactgcataggaatttagaacctaacttttataggttatcaaaactgttgtcaccattgcacaattttgtcctaatatatacatagaaactttgtggggcatgttaagttacagtttgcacaagttcatctcatttgtattccattgattttttttttcttctaaacattttttcttcaaacagtatataactttttttaggggatttttttttagacagcaaaaactatctgaagatttccatttgtcaaaaagtaatgatttcttgataattgtgtagtaatgttttttagaacccagcagttaccttaaagctgaatttatatttagtaacttctgtgttaatactggatagcatgaattctgcattgagaaactgaatagctgtcataaaatgaaactttctttctaaagaaagatactcacatgagttcttgaagaatagtcataactagattaagatctgtgttttagtttaatagtttgaagtgcctgtttgggataatgataggtaatttagatgaatttaggggaaaaaaaagttatctgcagatatgttgagggcccatctctccccccacacccccacagagctaactgggttacagtgttttatccgaaagtttccaattccactgtcttgtgttttcatgttgaaaatacttttgcatttttcctttgagtgccaatttcttactagtactatttcttaatgtaacatgtttacctggaatgtattttaactatttttgtatagtgtaaactgaaacatgcacattttgtacattgtgctttcttttgtgggacatatgcagtgtgatccagttgttttccatcatttggttgcgctgacctaggaatgttggtcatatcaaacattaaaaatgaccactcttttaattgaaattaacttttaaatgtttataggagtatgtgctgtgaagtgatctaaaatttgtaatatttttgtcatgaactgtactactcctaattattgtaatgtaataaaaatagttacagtgacaaaaaaaaaaaaaaa

SEQ ID NO: 6 - protein, 189 aa, Artificial sequence
  Synthetic Construct
MTEYKLVVVGASGVGKSALTIQLIQNHFVDEYDPTIEDSYRKQVVIDGETCLLDILDTAGQEEYSAMRDQYMRTGEGFLCVFAINNTKSFEDIHHYREQIKRVKDSEDVPMVLVGNKCDLPSRTVDTKQAQDLARSYGIPFIETSAKTRQRVEDAFYTLVREIRQYRLKKISKEEKTPGCVKIKKCIIM

SEQ ID NO: 7 - DNA, 5436 bp, Artificial sequence
  /note="Description of Artificial Sequence:mutated Homo sapiens v-Ki-ras2 Kirsten rat sarcoma viral oncogene homolog (KRAS), transcript variant a, mutation KRAS_G12A"
  CDS (182)..(751)
ggccgcggcggcggaggcagcagcggcggcggcagtggcggcggcgaaggtggcggcggctcggccagtactcccggcccccgccatttcggactgggagcgagcgcggcgcaggcactgaaggcggcggcggggccagaggctcagcggctcccaggtgcgggagagaggcctgctgaaaatgactgaatataaacttgtggtagttggagctgctggcgtaggcaagagtgccttgacgatacagctaattcagaatcattttgtggacgaatatgatccaacaatagaggattcctacaggaagcaagtagtaattgatggagaaacctgtctcttggatattctcgacacagcaggtcaagaggagtacagtgcaatgagggaccagtacatgaggactggggagggctttctttgtgtatttgccataaataatactaaatcatttgaagatattcaccattatagagaacaaattaaaagagttaaggactctgaagatgtacctatggtcctagtaggaaataaatgtgatttgccttctagaacagtagacacaaaacaggctcaggacttagcaagaagttatggaattccttttattgaaacatcagcaaagacaagacagagagtggaggatgctttttatacattggtgagggagatccgacaatacagattgaaaaaaatcagcaaagaagaaaagactcctggctgtgtgaaaattaaaaaatgcattataatgtaatctgggtgttgatgatgccttctatacattagttcgagaaattcgaaaacataaagaaaagatgagcaaagatggtaaaaagaagaaaaagaagtcaaagacaaagtgtgtaattatgtaaatacaatttgtacttttttcttaaggcatactagtacaagtggtaatttttgtacattacactaaattattagcatttgttttagcattacctaatttttttcctgctccatgcagactgttagcttttaccttaaatgcttattttaaaatgacagtggaagtttttttttcctctaagtgccagtattcccagagttttggtttttgaactagcaatgcctgtgaaaaagaaactgaatacctaagatttctgtcttggggtttttggtgcatgcagttgattacttcttatttttcttaccaattgtgaatgttggtgtgaaacaaattaatgaagcttttgaatcatccctattctgtgttttatctagtcacataaatggattaattactaatttcagttgagaccttctaattggtttttactgaaacattgagggaacacaaatttatgggcttcctgatgatgattcttctaggcatcatgtcctatagtttgtcatccctgatgaatgtaaagttacactgttcacaaaggttttgtctcctttccactgctattagtcatggtcactctccccaaaatattatattttttctataaaaagaaaaaaatggaaaaaaattacaaggcaatggaaactattataaggccatttccttttcacattagataaattactataaagactcctaatagcttttcctgttaaggcagacccagtatgaaatggggattattatagcaaccattttggggctatatttacatgctactaaatttttataataattgaaaagattttaacaagtataaaaaattctcataggaattaaatgtagtctccctgtgtcagactgctctttcatagtataactttaaatcttttcttcaacttgagtctttgaagatagttttaattctgcttgtgacattaaaagattatttgggccagttatagcttattaggtgttgaagagaccaaggttgcaaggccaggccctgtgtgaacctttgagctttcatagagagtttcacagcatggactgtgtccccacggtcatccagtgttgtcatgcattggttagtcaaaatggggagggactagggcagtttggatagctcaacaagatacaatctcactctgtggtggtcctgctgacaaatcaagagcattgcttttgtttcttaagaaaacaaactcttttttaaaaattacttttaaatattaactcaaaagttgagattttggggtggtggtgtgccaagacattaattttttttttaaacaatgaagtgaaaaagttttacaatctctaggtttggctagttctcttaacactggttaaattaacattgcataaacacttttcaagtctgatccatatttaataatgctttaaaataaaaataaaaacaatccttttgataaatttaaaatgttacttattttaaaataaatgaagtgagatggcatggtgaggtgaaagtatcactggactaggaagaaggtgacttaggttctagataggtgtcttttaggactctgattttgaggacatcacttactatccatttcttcatgttaaaagaagtcatctcaaactcttagttttttttttttacaactatgtaatttatattccatttacataaggatacacttatttgtcaagctcagcacaatctgtaaatttttaacctatgttacaccatcttcagtgccagtcttgggcaaaattgtgcaagaggtgaagtttatatttgaatatccattctcgttttaggactcttcttccatattagtgtcatcttgcctccctaccttccacatgccccatgacttgatgcagttttaatacttgtaattcccctaaccataagatttactgctgctgtggatatctccatgaagttttcccactgagtcacatcagaaatgccctacatcttatttcctcagggctcaagagaatctgacagataccataaagggatttgacctaatcactaattttcaggtggtggctgatgctttgaacatctctttgctgcccaatccattagcgacagtaggatttttcaaacctggtatgaatagacagaaccctatccagtggaaggagaatttaataaagatagtgctgaaagaattccttaggtaatctataactaggactactcctggtaacagtaatacattccattgttttagtaaccagaaatcttcatgcaatgaaaaatactttaattcatgaagcttactttttttttttggtgtcagagtctcgctcttgtcacccaggctggaatgcagtggcgccatctcagctcactgcaacctccatctcccaggttcaagcgattctcgtgcctcggcctcctgagtagctgggattacaggcgtgtgccactacactcaactaatttttgtatttttaggagagacggggtttcaccctgttggccaggctggtctcgaactcctgacctcaagtgattcacccaccttggcctcataaacctgttttgcagaactcatttattcagcaaatatttattgagtgcctaccagatgccagtcaccgcacaaggcactgggtatatggtatccccaaacaagagacataatcccggtccttaggtagtgctagtgtggtctgtaatatcttactaaggcctttggtatacgacccagagataacacgatgcgtattttagttttgcaaagaaggggtttggtctctgtgccagctctataattgttttgctacgattccactgaaactcttcgatcaagctactttatgtaaatcacttcattgttttaaaggaataaacttgattatattgtttttttatttggcataactgtgattcttttaggacaattactgtacacattaaggtgtatgtcagatattcatattgacccaaatgtgtaatattccagttttctctgcataagtaattaaaatatacttaaaaattaatagttttatctgggtacaaataaacaggtgcctgaactagttcacagacaaggaaacttctatgtaaaaatcactatgatttctgaattgctatgtgaaactacagatctttggaacactgtttaggtagggtgttaagacttacacagtacctcgtttctacacagagaaagaaatggccatacttcaggaactgcagtgcttatgaggggatatttaggcctcttgaatttttgatgtagatgggcatttttttaaggtagtggttaattacctttatgtgaactttgaatggtttaacaaaagatttgtttttgtagagattttaaagggggagaattctagaaataaatgttacctaattattacagccttaaagacaaaaatccttgttgaagtttttttaaaaaaagctaaattacatagacttaggcattaacatgtttgtggaagaatatagcagacgtatattgtatcatttgagtgaatgttcccaagtaggcattctaggctctatttaactgagtcacactgcataggaatttagaacctaacttttataggttatcaaaactgttgtcaccattgcacaattttgtcctaatatatacatagaaactttgtggggcatgttaagttacagtttgcacaagttcatctcatttgtattccattgattttttttttcttctaaacattttttcttcaaacagtatataactttttttaggggatttttttttagacagcaaaaactatctgaagatttccatttgtcaaaaagtaatgatttcttgataattgtgtagtaatgttttttagaacccagcagttaccttaaagctgaatttatatttagtaacttctgtgttaatactggatagcatgaattctgcattgagaaactgaatagctgtcataaaatgaaactttctttctaaagaaagatactcacatgagttcttgaagaatagtcataactagattaagatctgtgttttagtttaatagtttgaagtgcctgtttgggataatgataggtaatttagatgaatttaggggaaaaaaaagttatctgcagatatgttgagggcccatctctccccccacacccccacagagctaactgggttacagtgttttatccgaaagtttccaattccactgtcttgtgttttcatgttgaaaatacttttgcatttttcctttgagtgccaatttcttactagtactatttcttaatgtaacatgtttacctggaatgtattttaactatttttgtatagtgtaaactgaaacatgcacattttgtacattgtgctttcttttgtgggacatatgcagtgtgatccagttgttttccatcatttggttgcgctgacctaggaatgttggtcatatcaaacattaaaaatgaccactcttttaattgaaattaacttttaaatgtttataggagtatgtgctgtgaagtgatctaaaatttgtaatatttttgtcatgaactgtactactcctaattattgtaatgtaataaaaatagttacagtgacaaaaaaaaaaaaaaa

SEQ ID NO: 8 - protein, 189 aa, Artificial sequence
  Synthetic Construct
MTEYKLVVVGAAGVGKSALTIQLIQNHFVDEYDPTIEDSYRKQVVIDGETCLLDILDTAGQEEYSAMRDQYMRTGEGFLCVFAINNTKSFEDIHHYREQIKRVKDSEDVPMVLVGNKCDLPSRTVDTKQAQDLARSYGIPFIETSAKTRQRVEDAFYTLVREIRQYRLKKISKEEKTPGCVKIKKCIIM

SEQ ID NO: 9 - DNA, 5436 bp, Artificial sequence
  /note="Description of Artificial Sequence: mutated Homo sapiens v-Ki-ras2 Kirsten rat sarcoma viral oncogene homolog (KRAS), transcript variant a, mutation KRAS_G12D"
  CDS (182)..(751)
ggccgcggcggcggaggcagcagcggcggcggcagtggcggcggcgaaggtggcggcggctcggccagtactcccggcccccgccatttcggactgggagcgagcgcggcgcaggcactgaaggcggcggcggggccagaggctcagcggctcccaggtgcgggagagaggcctgctgaaaatgactgaatataaacttgtggtagttggagctgatggcgtaggcaagagtgccttgacgatacagctaattcagaatcattttgtggacgaatatgatccaacaatagaggattcctacaggaagcaagtagtaattgatggagaaacctgtctcttggatattctcgacacagcaggtcaagaggagtacagtgcaatgagggaccagtacatgaggactggggagggctttctttgtgtatttgccataaataatactaaatcatttgaagatattcaccattatagagaacaaattaaaagagttaaggactctgaagatgtacctatggtcctagtaggaaataaatgtgatttgccttctagaacagtagacacaaaacaggctcaggacttagcaagaagttatggaattccttttattgaaacatcagcaaagacaagacagagagtggaggatgctttttatacattggtgagggagatccgacaatacagattgaaaaaaatcagcaaagaagaaaagactcctggctgtgtgaaaattaaaaaatgcattataatgtaatctgggtgttgatgatgccttctatacattagttcgagaaattcgaaaacataaagaaaagatgagcaaagatggtaaaaagaagaaaaagaagtcaaagacaaagtgtgtaattatgtaaatacaatttgtacttttttcttaaggcatactagtacaagtggtaatttttgtacattacactaaattattagcatttgttttagcattacctaatttttttcctgctccatgcagactgttagcttttaccttaaatgcttattttaaaatgacagtggaagtttttttttcctctaagtgccagtattcccagagttttggtttttgaactagcaatgcctgtgaaaaagaaactgaatacctaagatttctgtcttggggtttttggtgcatgcagttgattacttcttatttttcttaccaattgtgaatgttggtgtgaaacaaattaatgaagcttttgaatcatccctattctgtgttttatctagtcacataaatggattaattactaatttcagttgagaccttctaattggtttttactgaaacattgagggaacacaaatttatgggcttcctgatgatgattcttctaggcatcatgtcctatagtttgtcatccctgatgaatgtaaagttacactgttcacaaaggttttgtctcctttccactgctattagtcatggtcactctccccaaaatattatattttttctataaaaagaaaaaaatggaaaaaaattacaaggcaatggaaactattataaggccatttccttttcacattagataaattactataaagactcctaatagcttttcctgttaaggcagacccagtatgaaatggggattattatagcaaccattttggggctatatttacatgctactaaatttttataataattgaaaagattttaacaagtataaaaaattctcataggaattaaatgtagtctccctgtgtcagactgctctttcatagtataactttaaatcttttcttcaacttgagtctttgaagatagttttaattctgcttgtgacattaaaagattatttgggccagttatagcttattaggtgttgaagagaccaaggttgcaaggccaggccctgtgtgaacctttgagctttcatagagagtttcacagcatggactgtgtccccacggtcatccagtgttgtcatgcattggttagtcaaaatggggagggactagggcagtttggatagctcaacaagatacaatctcactctgtggtggtcctgctgacaaatcaagagcattgcttttgtttcttaagaaaacaaactcttttttaaaaattacttttaaatattaactcaaaagttgagattttggggtggtggtgtgccaagacattaattttttttttaaacaatgaagtgaaaaagttttacaatctctaggtttggctagttctcttaacactggttaaattaacattgcataaacacttttcaagtctgatccatatttaataatgctttaaaataaaaataaaaacaatccttttgataaatttaaaatgttacttattttaaaataaatgaagtgagatggcatggtgaggtgaaagtatcactggactaggaagaaggtgacttaggttctagataggtgtcttttaggactctgattttgaggacatcacttactatccatttcttcatgttaaaagaagtcatctcaaactcttagttttttttttttacaactatgtaatttatattccatttacataaggatacacttatttgtcaagctcagcacaatctgtaaatttttaacctatgttacaccatcttcagtgccagtcttgggcaaaattgtgcaagaggtgaagtttatatttgaatatccattctcgttttaggactcttcttccatattagtgtcatcttgcctccctaccttccacatgccccatgacttgatgcagttttaatacttgtaattcccctaaccataagatttactgctgctgtggatatctccatgaagttttcccactgagtcacatcagaaatgccctacatcttatttcctcagggctcaagagaatctgacagataccataaagggatttgacctaatcactaattttcaggtggtggctgatgctttgaacatctctttgctgcccaatccattagcgacagtaggatttttcaaacctggtatgaatagacagaaccctatccagtggaaggagaatttaataaagatagtgctgaaagaattccttaggtaatctataactaggactactcctggtaacagtaatacattccattgttttagtaaccagaaatcttcatgcaatgaaaaatactttaattcatgaagcttactttttttttttggtgtcagagtctcgctcttgtcacccaggctggaatgcagtggcgccatctcagctcactgcaacctccatctcccaggttcaagcgattctcgtgcctcggcctcctgagtagctgggattacaggcgtgtgccactacactcaactaatttttgtatttttaggagagacggggtttcaccctgttggccaggctggtctcgaactcctgacctcaagtgattcacccaccttggcctcataaacctgttttgcagaactcatttattcagcaaatatttattgagtgcctaccagatgccagtcaccgcacaaggcactgggtatatggtatccccaaacaagagacataatcccggtccttaggtagtgctagtgtggtctgtaatatcttactaaggcctttggtatacgacccagagataacacgatgcgtattttagttttgcaaagaaggggtttggtctctgtgccagctctataattgttttgctacgattccactgaaactcttcgatcaagctactttatgtaaatcacttcattgttttaaaggaataaacttgattatattgtttttttatttggcataactgtgattcttttaggacaattactgtacacattaaggtgtatgtcagatattcatattgacccaaatgtgtaatattccagttttctctgcataagtaattaaaatatacttaaaaattaatagttttatctgggtacaaataaacaggtgcctgaactagttcacagacaaggaaacttctatgtaaaaatcactatgatttctgaattgctatgtgaaactacagatctttggaacactgtttaggtagggtgttaagacttacacagtacctcgtttctacacagagaaagaaatggccatacttcaggaactgcagtgcttatgaggggatatttaggcctcttgaatttttgatgtagatgggcatttttttaaggtagtggttaattacctttatgtgaactttgaatggtttaacaaaagatttgtttttgtagagattttaaagggggagaattctagaaataaatgttacctaattattacagccttaaagacaaaaatccttgttgaagtttttttaaaaaaagctaaattacatagacttaggcattaacatgtttgtggaagaatatagcagacgtatattgtatcatttgagtgaatgttcccaagtaggcattctaggctctatttaactgagtcacactgcataggaatttagaacctaacttttataggttatcaaaactgttgtcaccattgcacaattttgtcctaatatatacatagaaactttgtggggcatgttaagttacagtttgcacaagttcatctcatttgtattccattgattttttttttcttctaaacattttttcttcaaacagtatataactttttttaggggatttttttttagacagcaaaaactatctgaagatttccatttgtcaaaaagtaatgatttcttgataattgtgtagtaatgttttttagaacccagcagttaccttaaagctgaatttatatttagtaacttctgtgttaatactggatagcatgaattctgcattgagaaactgaatagctgtcataaaatgaaactttctttctaaagaaagatactcacatgagttcttgaagaatagtcataactagattaagatctgtgttttagtttaatagtttgaagtgcctgtttgggataatgataggtaatttagatgaatttaggggaaaaaaaagttatctgcagatatgttgagggcccatctctccccccacacccccacagagctaactgggttacagtgttttatccgaaagtttccaattccactgtcttgtgttttcatgttgaaaatacttttgcatttttcctttgagtgccaatttcttactagtactatttcttaatgtaacatgtttacctggaatgtattttaactatttttgtatagtgtaaactgaaacatgcacattttgtacattgtgctttcttttgtgggacatatgcagtgtgatccagttgttttccatcatttggttgcgctgacctaggaatgttggtcatatcaaacattaaaaatgaccactcttttaattgaaattaacttttaaatgtttataggagtatgtgctgtgaagtgatctaaaatttgtaatatttttgtcatgaactgtactactcctaattattgtaatgtaataaaaatagttacagtgacaaaaaaaaaaaaaaa

SEQ ID NO: 10 - protein, 189 aa, Artificial sequence
  Synthetic Construct
MTEYKLVVVGADGVGKSALTIQLIQNHFVDEYDPTIEDSYRKQVVIDGETCLLDILDTAGQEEYSAMRDQYMRTGEGFLCVFAINNTKSFEDIHHYREQIKRVKDSEDVPMVLVGNKCDLPSRTVDTKQAQDLARSYGIPFIETSAKTRQRVEDAFYTLVREIRQYRLKKISKEEKTPGCVKIKKCIIM

SEQ ID NO: 11 - DNA, 5436 bp, Artificial sequence
  /note="Description of Artificial Sequence: mutated Homo sapiens v-Ki-ras2 Kirsten rat sarcoma viral oncogene homolog (KRAS), transcript variant a, mutation KRAS_G12C"
  CDS (182)..(751)
ggccgcggcggcggaggcagcagcggcggcggcagtggcggcggcgaaggtggcggcggctcggccagtactcccggcccccgccatttcggactgggagcgagcgcggcgcaggcactgaaggcggcggcggggccagaggctcagcggctcccaggtgcgggagagaggcctgctgaaaatgactgaatataaacttgtggtagttggagcttgtggcgtaggcaagagtgccttgacgatacagctaattcagaatcattttgtggacgaatatgatccaacaatagaggattcctacaggaagcaagtagtaattgatggagaaacctgtctcttggatattctcgacacagcaggtcaagaggagtacagtgcaatgagggaccagtacatgaggactggggagggctttctttgtgtatttgccataaataatactaaatcatttgaagatattcaccattatagagaacaaattaaaagagttaaggactctgaagatgtacctatggtcctagtaggaaataaatgtgatttgccttctagaacagtagacacaaaacaggctcaggacttagcaagaagttatggaattccttttattgaaacatcagcaaagacaagacagagagtggaggatgctttttatacattggtgagggagatccgacaatacagattgaaaaaaatcagcaaagaagaaaagactcctggctgtgtgaaaattaaaaaatgcattataatgtaatctgggtgttgatgatgccttctatacattagttcgagaaattcgaaaacataaagaaaagatgagcaaagatggtaaaaagaagaaaaagaagtcaaagacaaagtgtgtaattatgtaaatacaatttgtacttttttcttaaggcatactagtacaagtggtaatttttgtacattacactaaattattagcatttgttttagcattacctaatttttttcctgctccatgcagactgttagcttttaccttaaatgcttattttaaaatgacagtggaagtttttttttcctctaagtgccagtattcccagagttttggtttttgaactagcaatgcctgtgaaaaagaaactgaatacctaagatttctgtcttggggtttttggtgcatgcagttgattacttcttatttttcttaccaattgtgaatgttggtgtgaaacaaattaatgaagcttttgaatcatccctattctgtgttttatctagtcacataaatggattaattactaatttcagttgagaccttctaattggtttttactgaaacattgagggaacacaaatttatgggcttcctgatgatgattcttctaggcatcatgtcctatagtttgtcatccctgatgaatgtaaagttacactgttcacaaaggttttgtctcctttccactgctattagtcatggtcactctccccaaaatattatattttttctataaaaagaaaaaaatggaaaaaaattacaaggcaatggaaactattataaggccatttccttttcacattagataaattactataaagactcctaatagcttttcctgttaaggcagacccagtatgaaatggggattattatagcaaccattttggggctatatttacatgctactaaatttttataataattgaaaagattttaacaagtataaaaaattctcataggaattaaatgtagtctccctgtgtcagactgctctttcatagtataactttaaatcttttcttcaacttgagtctttgaagatagttttaattctgcttgtgacattaaaagattatttgggccagttatagcttattaggtgttgaagagaccaaggttgcaaggccaggccctgtgtgaacctttgagctttcatagagagtttcacagcatggactgtgtccccacggtcatccagtgttgtcatgcattggttagtcaaaatggggagggactagggcagtttggatagctcaacaagatacaatctcactctgtggtggtcctgctgacaaatcaagagcattgcttttgtttcttaagaaaacaaactcttttttaaaaattacttttaaatattaactcaaaagttgagattttggggtggtggtgtgccaagacattaattttttttttaaacaatgaagtgaaaaagttttacaatctctaggtttggctagttctcttaacactggttaaattaacattgcataaacacttttcaagtctgatccatatttaataatgctttaaaataaaaataaaaacaatccttttgataaatttaaaatgttacttattttaaaataaatgaagtgagatggcatggtgaggtgaaagtatcactggactaggaagaaggtgacttaggttctagataggtgtcttttaggactctgattttgaggacatcacttactatccatttcttcatgttaaaagaagtcatctcaaactcttagttttttttttttacaactatgtaatttatattccatttacataaggatacacttatttgtcaagctcagcacaatctgtaaatttttaacctatgttacaccatcttcagtgccagtcttgggcaaaattgtgcaagaggtgaagtttatatttgaatatccattctcgttttaggactcttcttccatattagtgtcatcttgcctccctaccttccacatgccccatgacttgatgcagttttaatacttgtaattcccctaaccataagatttactgctgctgtggatatctccatgaagttttcccactgagtcacatcagaaatgccctacatcttatttcctcagggctcaagagaatctgacagataccataaagggatttgacctaatcactaattttcaggtggtggctgatgctttgaacatctctttgctgcccaatccattagcgacagtaggatttttcaaacctggtatgaatagacagaaccctatccagtggaaggagaatttaataaagatagtgctgaaagaattccttaggtaatctataactaggactactcctggtaacagtaatacattccattgttttagtaaccagaaatcttcatgcaatgaaaaatactttaattcatgaagcttactttttttttttggtgtcagagtctcgctcttgtcacccaggctggaatgcagtggcgccatctcagctcactgcaacctccatctcccaggttcaagcgattctcgtgcctcggcctcctgagtagctgggattacaggcgtgtgccactacactcaactaatttttgtatttttaggagagacggggtttcaccctgttggccaggctggtctcgaactcctgacctcaagtgattcacccaccttggcctcataaacctgttttgcagaactcatttattcagcaaatatttattgagtgcctaccagatgccagtcaccgcacaaggcactgggtatatggtatccccaaacaagagacataatcccggtccttaggtagtgctagtgtggtctgtaatatcttactaaggcctttggtatacgacccagagataacacgatgcgtattttagttttgcaaagaaggggtttggtctctgtgccagctctataattgttttgctacgattccactgaaactcttcgatcaagctactttatgtaaatcacttcattgttttaaaggaataaacttgattatattgtttttttatttggcataactgtgattcttttaggacaattactgtacacattaaggtgtatgtcagatattcatattgacccaaatgtgtaatattccagttttctctgcataagtaattaaaatatacttaaaaattaatagttttatctgggtacaaataaacaggtgcctgaactagttcacagacaaggaaacttctatgtaaaaatcactatgatttctgaattgctatgtgaaactacagatctttggaacactgtttaggtagggtgttaagacttacacagtacctcgtttctacacagagaaagaaatggccatacttcaggaactgcagtgcttatgaggggatatttaggcctcttgaatttttgatgtagatgggcatttttttaaggtagtggttaattacctttatgtgaactttgaatggtttaacaaaagatttgtttttgtagagattttaaagggggagaattctagaaataaatgttacctaattattacagccttaaagacaaaaatccttgttgaagtttttttaaaaaaagctaaattacatagacttaggcattaacatgtttgtggaagaatatagcagacgtatattgtatcatttgagtgaatgttcccaagtaggcattctaggctctatttaactgagtcacactgcataggaatttagaacctaacttttataggttatcaaaactgttgtcaccattgcacaattttgtcctaatatatacatagaaactttgtggggcatgttaagttacagtttgcacaagttcatctcatttgtattccattgattttttttttcttctaaacattttttcttcaaacagtatataactttttttaggggatttttttttagacagcaaaaactatctgaagatttccatttgtcaaaaagtaatgatttcttgataattgtgtagtaatgttttttagaacccagcagttaccttaaagctgaatttatatttagtaacttctgtgttaatactggatagcatgaattctgcattgagaaactgaatagctgtcataaaatgaaactttctttctaaagaaagatactcacatgagttcttgaagaatagtcataactagattaagatctgtgttttagtttaatagtttgaagtgcctgtttgggataatgataggtaatttagatgaatttaggggaaaaaaaagttatctgcagatatgttgagggcccatctctccccccacacccccacagagctaactgggttacagtgttttatccgaaagtttccaattccactgtcttgtgttttcatgttgaaaatacttttgcatttttcctttgagtgccaatttcttactagtactatttcttaatgtaacatgtttacctggaatgtattttaactatttttgtatagtgtaaactgaaacatgcacattttgtacattgtgctttcttttgtgggacatatgcagtgtgatccagttgttttccatcatttggttgcgctgacctaggaatgttggtcatatcaaacattaaaaatgaccactcttttaattgaaattaacttttaaatgtttataggagtatgtgctgtgaagtgatctaaaatttgtaatatttttgtcatgaactgtactactcctaattattgtaatgtaataaaaatagttacagtgacaaaaaaaaaaaaaaa

SEQ ID NO: 12 - protein, 189 aa, Artificial sequence
  Synthetic Construct
MTEYKLVVVGACGVGKSALTIQLIQNHFVDEYDPTIEDSYRKQVVIDGETCLLDILDTAGQEEYSAMRDQYMRTGEGFLCVFAINNTKSFEDIHHYREQIKRVKDSEDVPMVLVGNKCDLPSRTVDTKQAQDLARSYGIPFIETSAKTRQRVEDAFYTLVREIRQYRLKKISKEEKTPGCVKIKKCIIM

SEQ ID NO: 13 - DNA, 5436 bp, Artificial sequence
  /note="Description of Artificial Sequence: mutated Homo sapiens v-Ki-ras2 Kirsten rat sarcoma viral oncogene homolog (KRAS), transcript variant a, mutation KRAS_G12R"
  CDS (182)..(751)
ggccgcggcggcggaggcagcagcggcggcggcagtggcggcggcgaaggtggcggcggctcggccagtactcccggcccccgccatttcggactgggagcgagcgcggcgcaggcactgaaggcggcggcggggccagaggctcagcggctcccaggtgcgggagagaggcctgctgaaaatgactgaatataaacttgtggtagttggagctcgtggcgtaggcaagagtgccttgacgatacagctaattcagaatcattttgtggacgaatatgatccaacaatagaggattcctacaggaagcaagtagtaattgatggagaaacctgtctcttggatattctcgacacagcaggtcaagaggagtacagtgcaatgagggaccagtacatgaggactggggagggctttctttgtgtatttgccataaataatactaaatcatttgaagatattcaccattatagagaacaaattaaaagagttaaggactctgaagatgtacctatggtcctagtaggaaataaatgtgatttgccttctagaacagtagacacaaaacaggctcaggacttagcaagaagttatggaattccttttattgaaacatcagcaaagacaagacagagagtggaggatgctttttatacattggtgagggagatccgacaatacagattgaaaaaaatcagcaaagaagaaaagactcctggctgtgtgaaaattaaaaaatgcattataatgtaatctgggtgttgatgatgccttctatacattagttcgagaaattcgaaaacataaagaaaagatgagcaaagatggtaaaaagaagaaaaagaagtcaaagacaaagtgtgtaattatgtaaatacaatttgtacttttttcttaaggcatactagtacaagtggtaatttttgtacattacactaaattattagcatttgttttagcattacctaatttttttcctgctccatgcagactgttagcttttaccttaaatgcttattttaaaatgacagtggaagtttttttttcctctaagtgccagtattcccagagttttggtttttgaactagcaatgcctgtgaaaaagaaactgaatacctaagatttctgtcttggggtttttggtgcatgcagttgattacttcttatttttcttaccaattgtgaatgttggtgtgaaacaaattaatgaagcttttgaatcatccctattctgtgttttatctagtcacataaatggattaattactaatttcagttgagaccttctaattggtttttactgaaacattgagggaacacaaatttatgggcttcctgatgatgattcttctaggcatcatgtcctatagtttgtcatccctgatgaatgtaaagttacactgttcacaaaggttttgtctcctttccactgctattagtcatggtcactctccccaaaatattatattttttctataaaaagaaaaaaatggaaaaaaattacaaggcaatggaaactattataaggccatttccttttcacattagataaattactataaagactcctaatagcttttcctgttaaggcagacccagtatgaaatggggattattatagcaaccattttggggctatatttacatgctactaaatttttataataattgaaaagattttaacaagtataaaaaattctcataggaattaaatgtagtctccctgtgtcagactgctctttcatagtataactttaaatcttttcttcaacttgagtctttgaagatagttttaattctgcttgtgacattaaaagattatttgggccagttatagcttattaggtgttgaagagaccaaggttgcaaggccaggccctgtgtgaacctttgagctttcatagagagtttcacagcatggactgtgtccccacggtcatccagtgttgtcatgcattggttagtcaaaatggggagggactagggcagtttggatagctcaacaagatacaatctcactctgtggtggtcctgctgacaaatcaagagcattgcttttgtttcttaagaaaacaaactcttttttaaaaattacttttaaatattaactcaaaagttgagattttggggtggtggtgtgccaagacattaattttttttttaaacaatgaagtgaaaaagttttacaatctctaggtttggctagttctcttaacactggttaaattaacattgcataaacacttttcaagtctgatccatatttaataatgctttaaaataaaaataaaaacaatccttttgataaatttaaaatgttacttattttaaaataaatgaagtgagatggcatggtgaggtgaaagtatcactggactaggaagaaggtgacttaggttctagataggtgtcttttaggactctgattttgaggacatcacttactatccatttcttcatgttaaaagaagtcatctcaaactcttagttttttttttttacaactatgtaatttatattccatttacataaggatacacttatttgtcaagctcagcacaatctgtaaatttttaacctatgttacaccatcttcagtgccagtcttgggcaaaattgtgcaagaggtgaagtttatatttgaatatccattctcgttttaggactcttcttccatattagtgtcatcttgcctccctaccttccacatgccccatgacttgatgcagttttaatacttgtaattcccctaaccataagatttactgctgctgtggatatctccatgaagttttcccactgagtcacatcagaaatgccctacatcttatttcctcagggctcaagagaatctgacagataccataaagggatttgacctaatcactaattttcaggtggtggctgatgctttgaacatctctttgctgcccaatccattagcgacagtaggatttttcaaacctggtatgaatagacagaaccctatccagtggaaggagaatttaataaagatagtgctgaaagaattccttaggtaatctataactaggactactcctggtaacagtaatacattccattgttttagtaaccagaaatcttcatgcaatgaaaaatactttaattcatgaagcttactttttttttttggtgtcagagtctcgctcttgtcacccaggctggaatgcagtggcgccatctcagctcactgcaacctccatctcccaggttcaagcgattctcgtgcctcggcctcctgagtagctgggattacaggcgtgtgccactacactcaactaatttttgtatttttaggagagacggggtttcaccctgttggccaggctggtctcgaactcctgacctcaagtgattcacccaccttggcctcataaacctgttttgcagaactcatttattcagcaaatatttattgagtgcctaccagatgccagtcaccgcacaaggcactgggtatatggtatccccaaacaagagacataatcccggtccttaggtagtgctagtgtggtctgtaatatcttactaaggcctttggtatacgacccagagataacacgatgcgtattttagttttgcaaagaaggggtttggtctctgtgccagctctataattgttttgctacgattccactgaaactcttcgatcaagctactttatgtaaatcacttcattgttttaaaggaataaacttgattatattgtttttttatttggcataactgtgattcttttaggacaattactgtacacattaaggtgtatgtcagatattcatattgacccaaatgtgtaatattccagttttctctgcataagtaattaaaatatacttaaaaattaatagttttatctgggtacaaataaacaggtgcctgaactagttcacagacaaggaaacttctatgtaaaaatcactatgatttctgaattgctatgtgaaactacagatctttggaacactgtttaggtagggtgttaagacttacacagtacctcgtttctacacagagaaagaaatggccatacttcaggaactgcagtgcttatgaggggatatttaggcctcttgaatttttgatgtagatgggcatttttttaaggtagtggttaattacctttatgtgaactttgaatggtttaacaaaagatttgtttttgtagagattttaaagggggagaattctagaaataaatgttacctaattattacagccttaaagacaaaaatccttgttgaagtttttttaaaaaaagctaaattacatagacttaggcattaacatgtttgtggaagaatatagcagacgtatattgtatcatttgagtgaatgttcccaagtaggcattctaggctctatttaactgagtcacactgcataggaatttagaacctaacttttataggttatcaaaactgttgtcaccattgcacaattttgtcctaatatatacatagaaactttgtggggcatgttaagttacagtttgcacaagttcatctcatttgtattccattgattttttttttcttctaaacattttttcttcaaacagtatataactttttttaggggatttttttttagacagcaaaaactatctgaagatttccatttgtcaaaaagtaatgatttcttgataattgtgtagtaatgttttttagaacccagcagttaccttaaagctgaatttatatttagtaacttctgtgttaatactggatagcatgaattctgcattgagaaactgaatagctgtcataaaatgaaactttctttctaaagaaagatactcacatgagttcttgaagaatagtcataactagattaagatctgtgttttagtttaatagtttgaagtgcctgtttgggataatgataggtaatttagatgaatttaggggaaaaaaaagttatctgcagatatgttgagggcccatctctccccccacacccccacagagctaactgggttacagtgttttatccgaaagtttccaattccactgtcttgtgttttcatgttgaaaatacttttgcatttttcctttgagtgccaatttcttactagtactatttcttaatgtaacatgtttacctggaatgtattttaactatttttgtatagtgtaaactgaaacatgcacattttgtacattgtgctttcttttgtgggacatatgcagtgtgatccagttgttttccatcatttggttgcgctgacctaggaatgttggtcatatcaaacattaaaaatgaccactcttttaattgaaattaacttttaaatgtttataggagtatgtgctgtgaagtgatctaaaatttgtaatatttttgtcatgaactgtactactcctaattattgtaatgtaataaaaatagttacagtgacaaaaaaaaaaaaaaa

SEQ ID NO: 14 - protein, 189 aa, Artificial sequence
  Synthetic Construct
MTEYKLVVVGARGVGKSALTIQLIQNHFVDEYDPTIEDSYRKQVVIDGETCLLDILDTAGQEEYSAMRDQYMRTGEGFLCVFAINNTKSFEDIHHYREQIKRVKDSEDVPMVLVGNKCDLPSRTVDTKQAQDLARSYGIPFIETSAKTRQRVEDAFYTLVREIRQYRLKKISKEEKTPGCVKIKKCIIM

SEQ ID NO: 15 - DNA, 5436 bp, Artificial sequence
  /note="Description of Artificial Sequence: mutated Homo sapiens v-Ki-ras2 Kirsten rat sarcoma viral oncogene homolog (KRAS), transcript variant a, mutation KRAS_G12F"
  CDS (182)..(751)
ggccgcggcggcggaggcagcagcggcggcggcagtggcggcggcgaaggtggcggcggctcggccagtactcccggcccccgccatttcggactgggagcgagcgcggcgcaggcactgaaggcggcggcggggccagaggctcagcggctcccaggtgcgggagagaggcctgctgaaaatgactgaatataaacttgtggtagttggagcttttggcgtaggcaagagtgccttgacgatacagctaattcagaatcattttgtggacgaatatgatccaacaatagaggattcctacaggaagcaagtagtaattgatggagaaacctgtctcttggatattctcgacacagcaggtcaagaggagtacagtgcaatgagggaccagtacatgaggactggggagggctttctttgtgtatttgccataaataatactaaatcatttgaagatattcaccattatagagaacaaattaaaagagttaaggactctgaagatgtacctatggtcctagtaggaaataaatgtgatttgccttctagaacagtagacacaaaacaggctcaggacttagcaagaagttatggaattccttttattgaaacatcagcaaagacaagacagagagtggaggatgctttttatacattggtgagggagatccgacaatacagattgaaaaaaatcagcaaagaagaaaagactcctggctgtgtgaaaattaaaaaatgcattataatgtaatctgggtgttgatgatgccttctatacattagttcgagaaattcgaaaacataaagaaaagatgagcaaagatggtaaaaagaagaaaaagaagtcaaagacaaagtgtgtaattatgtaaatacaatttgtacttttttcttaaggcatactagtacaagtggtaatttttgtacattacactaaattattagcatttgttttagcattacctaatttttttcctgctccatgcagactgttagcttttaccttaaatgcttattttaaaatgacagtggaagtttttttttcctctaagtgccagtattcccagagttttggtttttgaactagcaatgcctgtgaaaaagaaactgaatacctaagatttctgtcttggggtttttggtgcatgcagttgattacttcttatttttcttaccaattgtgaatgttggtgtgaaacaaattaatgaagcttttgaatcatccctattctgtgttttatctagtcacataaatggattaattactaatttcagttgagaccttctaattggtttttactgaaacattgagggaacacaaatttatgggcttcctgatgatgattcttctaggcatcatgtcctatagtttgtcatccctgatgaatgtaaagttacactgttcacaaaggttttgtctcctttccactgctattagtcatggtcactctccccaaaatattatattttttctataaaaagaaaaaaatggaaaaaaattacaaggcaatggaaactattataaggccatttccttttcacattagataaattactataaagactcctaatagcttttcctgttaaggcagacccagtatgaaatggggattattatagcaaccattttggggctatatttacatgctactaaatttttataataattgaaaagattttaacaagtataaaaaattctcataggaattaaatgtagtctccctgtgtcagactgctctttcatagtataactttaaatcttttcttcaacttgagtctttgaagatagttttaattctgcttgtgacattaaaagattatttgggccagttatagcttattaggtgttgaagagaccaaggttgcaaggccaggccctgtgtgaacctttgagctttcatagagagtttcacagcatggactgtgtccccacggtcatccagtgttgtcatgcattggttagtcaaaatggggagggactagggcagtttggatagctcaacaagatacaatctcactctgtggtggtcctgctgacaaatcaagagcattgcttttgtttcttaagaaaacaaactcttttttaaaaattacttttaaatattaactcaaaagttgagattttggggtggtggtgtgccaagacattaattttttttttaaacaatgaagtgaaaaagttttacaatctctaggtttggctagttctcttaacactggttaaattaacattgcataaacacttttcaagtctgatccatatttaataatgctttaaaataaaaataaaaacaatccttttgataaatttaaaatgttacttattttaaaataaatgaagtgagatggcatggtgaggtgaaagtatcactggactaggaagaaggtgacttaggttctagataggtgtcttttaggactctgattttgaggacatcacttactatccatttcttcatgttaaaagaagtcatctcaaactcttagttttttttttttacaactatgtaatttatattccatttacataaggatacacttatttgtcaagctcagcacaatctgtaaatttttaacctatgttacaccatcttcagtgccagtcttgggcaaaattgtgcaagaggtgaagtttatatttgaatatccattctcgttttaggactcttcttccatattagtgtcatcttgcctccctaccttccacatgccccatgacttgatgcagttttaatacttgtaattcccctaaccataagatttactgctgctgtggatatctccatgaagttttcccactgagtcacatcagaaatgccctacatcttatttcctcagggctcaagagaatctgacagataccataaagggatttgacctaatcactaattttcaggtggtggctgatgctttgaacatctctttgctgcccaatccattagcgacagtaggatttttcaaacctggtatgaatagacagaaccctatccagtggaaggagaatttaataaagatagtgctgaaagaattccttaggtaatctataactaggactactcctggtaacagtaatacattccattgttttagtaaccagaaatcttcatgcaatgaaaaatactttaattcatgaagcttactttttttttttggtgtcagagtctcgctcttgtcacccaggctggaatgcagtggcgccatctcagctcactgcaacctccatctcccaggttcaagcgattctcgtgcctcggcctcctgagtagctgggattacaggcgtgtgccactacactcaactaatttttgtatttttaggagagacggggtttcaccctgttggccaggctggtctcgaactcctgacctcaagtgattcacccaccttggcctcataaacctgttttgcagaactcatttattcagcaaatatttattgagtgcctaccagatgccagtcaccgcacaaggcactgggtatatggtatccccaaacaagagacataatcccggtccttaggtagtgctagtgtggtctgtaatatcttactaaggcctttggtatacgacccagagataacacgatgcgtattttagttttgcaaagaaggggtttggtctctgtgccagctctataattgttttgctacgattccactgaaactcttcgatcaagctactttatgtaaatcacttcattgttttaaaggaataaacttgattatattgtttttttatttggcataactgtgattcttttaggacaattactgtacacattaaggtgtatgtcagatattcatattgacccaaatgtgtaatattccagttttctctgcataagtaattaaaatatacttaaaaattaatagttttatctgggtacaaataaacaggtgcctgaactagttcacagacaaggaaacttctatgtaaaaatcactatgatttctgaattgctatgtgaaactacagatctttggaacactgtttaggtagggtgttaagacttacacagtacctcgtttctacacagagaaagaaatggccatacttcaggaactgcagtgcttatgaggggatatttaggcctcttgaatttttgatgtagatgggcatttttttaaggtagtggttaattacctttatgtgaactttgaatggtttaacaaaagatttgtttttgtagagattttaaagggggagaattctagaaataaatgttacctaattattacagccttaaagacaaaaatccttgttgaagtttttttaaaaaaagctaaattacatagacttaggcattaacatgtttgtggaagaatatagcagacgtatattgtatcatttgagtgaatgttcccaagtaggcattctaggctctatttaactgagtcacactgcataggaatttagaacctaacttttataggttatcaaaactgttgtcaccattgcacaattttgtcctaatatatacatagaaactttgtggggcatgttaagttacagtttgcacaagttcatctcatttgtattccattgattttttttttcttctaaacattttttcttcaaacagtatataactttttttaggggatttttttttagacagcaaaaactatctgaagatttccatttgtcaaaaagtaatgatttcttgataattgtgtagtaatgttttttagaacccagcagttaccttaaagctgaatttatatttagtaacttctgtgttaatactggatagcatgaattctgcattgagaaactgaatagctgtcataaaatgaaactttctttctaaagaaagatactcacatgagttcttgaagaatagtcataactagattaagatctgtgttttagtttaatagtttgaagtgcctgtttgggataatgataggtaatttagatgaatttaggggaaaaaaaagttatctgcagatatgttgagggcccatctctccccccacacccccacagagctaactgggttacagtgttttatccgaaagtttccaattccactgtcttgtgttttcatgttgaaaatacttttgcatttttcctttgagtgccaatttcttactagtactatttcttaatgtaacatgtttacctggaatgtattttaactatttttgtatagtgtaaactgaaacatgcacattttgtacattgtgctttcttttgtgggacatatgcagtgtgatccagttgttttccatcatttggttgcgctgacctaggaatgttggtcatatcaaacattaaaaatgaccactcttttaattgaaattaacttttaaatgtttataggagtatgtgctgtgaagtgatctaaaatttgtaatatttttgtcatgaactgtactactcctaattattgtaatgtaataaaaatagttacagtgacaaaaaaaaaaaaaaa

SEQ ID NO: 16 - protein, 189 aa, Artificial sequence
  Synthetic Construct
MTEYKLVVVGAFGVGKSALTIQLIQNHFVDEYDPTIEDSYRKQVVIDGETCLLDILDTAGQEEYSAMRDQYMRTGEGFLCVFAINNTKSFEDIHHYREQIKRVKDSEDVPMVLVGNKCDLPSRTVDTKQAQDLARSYGIPFIETSAKTRQRVEDAFYTLVREIRQYRLKKISKEEKTPGCVKIKKCIIM

SEQ ID NO: 17 - DNA, 5436 bp, Artificial sequence
  /note="Description of Artificial Sequence: mutated Homo sapiens v-Ki-ras2 Kirsten rat sarcoma viral oncogene homolog (KRAS), transcript variant a, mutation KRAS_G13C"
  CDS (182)..(751)
ggccgcggcggcggaggcagcagcggcggcggcagtggcggcggcgaaggtggcggcggctcggccagtactcccggcccccgccatttcggactgggagcgagcgcggcgcaggcactgaaggcggcggcggggccagaggctcagcggctcccaggtgcgggagagaggcctgctgaaaatgactgaatataaacttgtggtagttggagctggttgcgtaggcaagagtgccttgacgatacagctaattcagaatcattttgtggacgaatatgatccaacaatagaggattcctacaggaagcaagtagtaattgatggagaaacctgtctcttggatattctcgacacagcaggtcaagaggagtacagtgcaatgagggaccagtacatgaggactggggagggctttctttgtgtatttgccataaataatactaaatcatttgaagatattcaccattatagagaacaaattaaaagagttaaggactctgaagatgtacctatggtcctagtaggaaataaatgtgatttgccttctagaacagtagacacaaaacaggctcaggacttagcaagaagttatggaattccttttattgaaacatcagcaaagacaagacagagagtggaggatgctttttatacattggtgagggagatccgacaatacagattgaaaaaaatcagcaaagaagaaaagactcctggctgtgtgaaaattaaaaaatgcattataatgtaatctgggtgttgatgatgccttctatacattagttcgagaaattcgaaaacataaagaaaagatgagcaaagatggtaaaaagaagaaaaagaagtcaaagacaaagtgtgtaattatgtaaatacaatttgtacttttttcttaaggcatactagtacaagtggtaatttttgtacattacactaaattattagcatttgttttagcattacctaatttttttcctgctccatgcagactgttagcttttaccttaaatgcttattttaaaatgacagtggaagtttttttttcctctaagtgccagtattcccagagttttggtttttgaactagcaatgcctgtgaaaaagaaactgaatacctaagatttctgtcttggggtttttggtgcatgcagttgattacttcttatttttcttaccaattgtgaatgttggtgtgaaacaaattaatgaagcttttgaatcatccctattctgtgttttatctagtcacataaatggattaattactaatttcagttgagaccttctaattggtttttactgaaacattgagggaacacaaatttatgggcttcctgatgatgattcttctaggcatcatgtcctatagtttgtcatccctgatgaatgtaaagttacactgttcacaaaggttttgtctcctttccactgctattagtcatggtcactctccccaaaatattatattttttctataaaaagaaaaaaatggaaaaaaattacaaggcaatggaaactattataaggccatttccttttcacattagataaattactataaagactcctaatagcttttcctgttaaggcagacccagtatgaaatggggattattatagcaaccattttggggctatatttacatgctactaaatttttataataattgaaaagattttaacaagtataaaaaattctcataggaattaaatgtagtctccctgtgtcagactgctctttcatagtataactttaaatcttttcttcaacttgagtctttgaagatagttttaattctgcttgtgacattaaaagattatttgggccagttatagcttattaggtgttgaagagaccaaggttgcaaggccaggccctgtgtgaacctttgagctttcatagagagtttcacagcatggactgtgtccccacggtcatccagtgttgtcatgcattggttagtcaaaatggggagggactagggcagtttggatagctcaacaagatacaatctcactctgtggtggtcctgctgacaaatcaagagcattgcttttgtttcttaagaaaacaaactcttttttaaaaattacttttaaatattaactcaaaagttgagattttggggtggtggtgtgccaagacattaattttttttttaaacaatgaagtgaaaaagttttacaatctctaggtttggctagttctcttaacactggttaaattaacattgcataaacacttttcaagtctgatccatatttaataatgctttaaaataaaaataaaaacaatccttttgataaatttaaaatgttacttattttaaaataaatgaagtgagatggcatggtgaggtgaaagtatcactggactaggaagaaggtgacttaggttctagataggtgtcttttaggactctgattttgaggacatcacttactatccatttcttcatgttaaaagaagtcatctcaaactcttagttttttttttttacaactatgtaatttatattccatttacataaggatacacttatttgtcaagctcagcacaatctgtaaatttttaacctatgttacaccatcttcagtgccagtcttgggcaaaattgtgcaagaggtgaagtttatatttgaatatccattctcgttttaggactcttcttccatattagtgtcatcttgcctccctaccttccacatgccccatgacttgatgcagttttaatacttgtaattcccctaaccataagatttactgctgctgtggatatctccatgaagttttcccactgagtcacatcagaaatgccctacatcttatttcctcagggctcaagagaatctgacagataccataaagggatttgacctaatcactaattttcaggtggtggctgatgctttgaacatctctttgctgcccaatccattagcgacagtaggatttttcaaacctggtatgaatagacagaaccctatccagtggaaggagaatttaataaagatagtgctgaaagaattccttaggtaatctataactaggactactcctggtaacagtaatacattccattgttttagtaaccagaaatcttcatgcaatgaaaaatactttaattcatgaagcttactttttttttttggtgtcagagtctcgctcttgtcacccaggctggaatgcagtggcgccatctcagctcactgcaacctccatctcccaggttcaagcgattctcgtgcctcggcctcctgagtagctgggattacaggcgtgtgccactacactcaactaatttttgtatttttaggagagacggggtttcaccctgttggccaggctggtctcgaactcctgacctcaagtgattcacccaccttggcctcataaacctgttttgcagaactcatttattcagcaaatatttattgagtgcctaccagatgccagtcaccgcacaaggcactgggtatatggtatccccaaacaagagacataatcccggtccttaggtagtgctagtgtggtctgtaatatcttactaaggcctttggtatacgacccagagataacacgatgcgtattttagttttgcaaagaaggggtttggtctctgtgccagctctataattgttttgctacgattccactgaaactcttcgatcaagctactttatgtaaatcacttcattgttttaaaggaataaacttgattatattgtttttttatttggcataactgtgattcttttaggacaattactgtacacattaaggtgtatgtcagatattcatattgacccaaatgtgtaatattccagttttctctgcataagtaattaaaatatacttaaaaattaatagttttatctgggtacaaataaacaggtgcctgaactagttcacagacaaggaaacttctatgtaaaaatcactatgatttctgaattgctatgtgaaactacagatctttggaacactgtttaggtagggtgttaagacttacacagtacctcgtttctacacagagaaagaaatggccatacttcaggaactgcagtgcttatgaggggatatttaggcctcttgaatttttgatgtagatgggcatttttttaaggtagtggttaattacctttatgtgaactttgaatggtttaacaaaagatttgtttttgtagagattttaaagggggagaattctagaaataaatgttacctaattattacagccttaaagacaaaaatccttgttgaagtttttttaaaaaaagctaaattacatagacttaggcattaacatgtttgtggaagaatatagcagacgtatattgtatcatttgagtgaatgttcccaagtaggcattctaggctctatttaactgagtcacactgcataggaatttagaacctaacttttataggttatcaaaactgttgtcaccattgcacaattttgtcctaatatatacatagaaactttgtggggcatgttaagttacagtttgcacaagttcatctcatttgtattccattgattttttttttcttctaaacattttttcttcaaacagtatataactttttttaggggatttttttttagacagcaaaaactatctgaagatttccatttgtcaaaaagtaatgatttcttgataattgtgtagtaatgttttttagaacccagcagttaccttaaagctgaatttatatttagtaacttctgtgttaatactggatagcatgaattctgcattgagaaactgaatagctgtcataaaatgaaactttctttctaaagaaagatactcacatgagttcttgaagaatagtcataactagattaagatctgtgttttagtttaatagtttgaagtgcctgtttgggataatgataggtaatttagatgaatttaggggaaaaaaaagttatctgcagatatgttgagggcccatctctccccccacacccccacagagctaactgggttacagtgttttatccgaaagtttccaattccactgtcttgtgttttcatgttgaaaatacttttgcatttttcctttgagtgccaatttcttactagtactatttcttaatgtaacatgtttacctggaatgtattttaactatttttgtatagtgtaaactgaaacatgcacattttgtacattgtgctttcttttgtgggacatatgcagtgtgatccagttgttttccatcatttggttgcgctgacctaggaatgttggtcatatcaaacattaaaaatgaccactcttttaattgaaattaacttttaaatgtttataggagtatgtgctgtgaagtgatctaaaatttgtaatatttttgtcatgaactgtactactcctaattattgtaatgtaataaaaatagttacagtgacaaaaaaaaaaaaaaa

SEQ ID NO: 18 - protein, 189 aa, Artificial sequence
  Synthetic Construct
MTEYKLVVVGAGCVGKSALTIQLIQNHFVDEYDPTIEDSYRKQVVIDGETCLLDILDTAGQEEYSAMRDQYMRTGEGFLCVFAINNTKSFEDIHHYREQIKRVKDSEDVPMVLVGNKCDLPSRTVDTKQAQDLARSYGIPFIETSAKTRQRVEDAFYTLVREIRQYRLKKISKEEKTPGCVKIKKCIIM

SEQ ID NO: 19 - DNA, 5436 bp, Artificial sequence
  /note="Description of Artificial Sequence: mutated Homo sapiens v-Ki-ras2 Kirsten rat sarcoma viral oncogene homolog (KRAS), transcript variant a, mutation KRAS_G13D"
  CDS (182)..(751)
ggccgcggcggcggaggcagcagcggcggcggcagtggcggcggcgaaggtggcggcggctcggccagtactcccggcccccgccatttcggactgggagcgagcgcggcgcaggcactgaaggcggcggcggggccagaggctcagcggctcccaggtgcgggagagaggcctgctgaaaatgactgaatataaacttgtggtagttggagctggtgacgtaggcaagagtgccttgacgatacagctaattcagaatcattttgtggacgaatatgatccaacaatagaggattcctacaggaagcaagtagtaattgatggagaaacctgtctcttggatattctcgacacagcaggtcaagaggagtacagtgcaatgagggaccagtacatgaggactggggagggctttctttgtgtatttgccataaataatactaaatcatttgaagatattcaccattatagagaacaaattaaaagagttaaggactctgaagatgtacctatggtcctagtaggaaataaatgtgatttgccttctagaacagtagacacaaaacaggctcaggacttagcaagaagttatggaattccttttattgaaacatcagcaaagacaagacagagagtggaggatgctttttatacattggtgagggagatccgacaatacagattgaaaaaaatcagcaaagaagaaaagactcctggctgtgtgaaaattaaaaaatgcattataatgtaatctgggtgttgatgatgccttctatacattagttcgagaaattcgaaaacataaagaaaagatgagcaaagatggtaaaaagaagaaaaagaagtcaaagacaaagtgtgtaattatgtaaatacaatttgtacttttttcttaaggcatactagtacaagtggtaatttttgtacattacactaaattattagcatttgttttagcattacctaatttttttcctgctccatgcagactgttagcttttaccttaaatgcttattttaaaatgacagtggaagtttttttttcctctaagtgccagtattcccagagttttggtttttgaactagcaatgcctgtgaaaaagaaactgaatacctaagatttctgtcttggggtttttggtgcatgcagttgattacttcttatttttcttaccaattgtgaatgttggtgtgaaacaaattaatgaagcttttgaatcatccctattctgtgttttatctagtcacataaatggattaattactaatttcagttgagaccttctaattggtttttactgaaacattgagggaacacaaatttatgggcttcctgatgatgattcttctaggcatcatgtcctatagtttgtcatccctgatgaatgtaaagttacactgttcacaaaggttttgtctcctttccactgctattagtcatggtcactctccccaaaatattatattttttctataaaaagaaaaaaatggaaaaaaattacaaggcaatggaaactattataaggccatttccttttcacattagataaattactataaagactcctaatagcttttcctgttaaggcagacccagtatgaaatggggattattatagcaaccattttggggctatatttacatgctactaaatttttataataattgaaaagattttaacaagtataaaaaattctcataggaattaaatgtagtctccctgtgtcagactgctctttcatagtataactttaaatcttttcttcaacttgagtctttgaagatagttttaattctgcttgtgacattaaaagattatttgggccagttatagcttattaggtgttgaagagaccaaggttgcaaggccaggccctgtgtgaacctttgagctttcatagagagtttcacagcatggactgtgtccccacggtcatccagtgttgtcatgcattggttagtcaaaatggggagggactagggcagtttggatagctcaacaagatacaatctcactctgtggtggtcctgctgacaaatcaagagcattgcttttgtttcttaagaaaacaaactcttttttaaaaattacttttaaatattaactcaaaagttgagattttggggtggtggtgtgccaagacattaattttttttttaaacaatgaagtgaaaaagttttacaatctctaggtttggctagttctcttaacactggttaaattaacattgcataaacacttttcaagtctgatccatatttaataatgctttaaaataaaaataaaaacaatccttttgataaatttaaaatgttacttattttaaaataaatgaagtgagatggcatggtgaggtgaaagtatcactggactaggaagaaggtgacttaggttctagataggtgtcttttaggactctgattttgaggacatcacttactatccatttcttcatgttaaaagaagtcatctcaaactcttagttttttttttttacaactatgtaatttatattccatttacataaggatacacttatttgtcaagctcagcacaatctgtaaatttttaacctatgttacaccatcttcagtgccagtcttgggcaaaattgtgcaagaggtgaagtttatatttgaatatccattctcgttttaggactcttcttccatattagtgtcatcttgcctccctaccttccacatgccccatgacttgatgcagttttaatacttgtaattcccctaaccataagatttactgctgctgtggatatctccatgaagttttcccactgagtcacatcagaaatgccctacatcttatttcctcagggctcaagagaatctgacagataccataaagggatttgacctaatcactaattttcaggtggtggctgatgctttgaacatctctttgctgcccaatccattagcgacagtaggatttttcaaacctggtatgaatagacagaaccctatccagtggaaggagaatttaataaagatagtgctgaaagaattccttaggtaatctataactaggactactcctggtaacagtaatacattccattgttttagtaaccagaaatcttcatgcaatgaaaaatactttaattcatgaagcttactttttttttttggtgtcagagtctcgctcttgtcacccaggctggaatgcagtggcgccatctcagctcactgcaacctccatctcccaggttcaagcgattctcgtgcctcggcctcctgagtagctgggattacaggcgtgtgccactacactcaactaatttttgtatttttaggagagacggggtttcaccctgttggccaggctggtctcgaactcctgacctcaagtgattcacccaccttggcctcataaacctgttttgcagaactcatttattcagcaaatatttattgagtgcctaccagatgccagtcaccgcacaaggcactgggtatatggtatccccaaacaagagacataatcccggtccttaggtagtgctagtgtggtctgtaatatcttactaaggcctttggtatacgacccagagataacacgatgcgtattttagttttgcaaagaaggggtttggtctctgtgccagctctataattgttttgctacgattccactgaaactcttcgatcaagctactttatgtaaatcacttcattgttttaaaggaataaacttgattatattgtttttttatttggcataactgtgattcttttaggacaattactgtacacattaaggtgtatgtcagatattcatattgacccaaatgtgtaatattccagttttctctgcataagtaattaaaatatacttaaaaattaatagttttatctgggtacaaataaacaggtgcctgaactagttcacagacaaggaaacttctatgtaaaaatcactatgatttctgaattgctatgtgaaactacagatctttggaacactgtttaggtagggtgttaagacttacacagtacctcgtttctacacagagaaagaaatggccatacttcaggaactgcagtgcttatgaggggatatttaggcctcttgaatttttgatgtagatgggcatttttttaaggtagtggttaattacctttatgtgaactttgaatggtttaacaaaagatttgtttttgtagagattttaaagggggagaattctagaaataaatgttacctaattattacagccttaaagacaaaaatccttgttgaagtttttttaaaaaaagctaaattacatagacttaggcattaacatgtttgtggaagaatatagcagacgtatattgtatcatttgagtgaatgttcccaagtaggcattctaggctctatttaactgagtcacactgcataggaatttagaacctaacttttataggttatcaaaactgttgtcaccattgcacaattttgtcctaatatatacatagaaactttgtggggcatgttaagttacagtttgcacaagttcatctcatttgtattccattgattttttttttcttctaaacattttttcttcaaacagtatataactttttttaggggatttttttttagacagcaaaaactatctgaagatttccatttgtcaaaaagtaatgatttcttgataattgtgtagtaatgttttttagaacccagcagttaccttaaagctgaatttatatttagtaacttctgtgttaatactggatagcatgaattctgcattgagaaactgaatagctgtcataaaatgaaactttctttctaaagaaagatactcacatgagttcttgaagaatagtcataactagattaagatctgtgttttagtttaatagtttgaagtgcctgtttgggataatgataggtaatttagatgaatttaggggaaaaaaaagttatctgcagatatgttgagggcccatctctccccccacacccccacagagctaactgggttacagtgttttatccgaaagtttccaattccactgtcttgtgttttcatgttgaaaatacttttgcatttttcctttgagtgccaatttcttactagtactatttcttaatgtaacatgtttacctggaatgtattttaactatttttgtatagtgtaaactgaaacatgcacattttgtacattgtgctttcttttgtgggacatatgcagtgtgatccagttgttttccatcatttggttgcgctgacctaggaatgttggtcatatcaaacattaaaaatgaccactcttttaattgaaattaacttttaaatgtttataggagtatgtgctgtgaagtgatctaaaatttgtaatatttttgtcatgaactgtactactcctaattattgtaatgtaataaaaatagttacagtgacaaaaaaaaaaaaaaa

SEQ ID NO: 20 - protein, 189 aa, Artificial sequence
  Synthetic Construct
MTEYKLVVVGAGDVGKSALTIQLIQNHFVDEYDPTIEDSYRKQVVIDGETCLLDILDTAGQEEYSAMRDQYMRTGEGFLCVFAINNTKSFEDIHHYREQIKRVKDSEDVPMVLVGNKCDLPSRTVDTKQAQDLARSYGIPFIETSAKTRQRVEDAFYTLVREIRQYRLKKISKEEKTPGCVKIKKCIIM

SEQ ID NO: 21 - DNA, 5436 bp, Artificial sequence
  /note="Description of Artificial Sequence: mutated Homo sapiens v-Ki-ras2 Kirsten rat sarcoma viral oncogene homolog (KRAS), transcript variant a, mutation KRAS_G13S"
  CDS (182)..(751)
ggccgcggcggcggaggcagcagcggcggcggcagtggcggcggcgaaggtggcggcggctcggccagtactcccggcccccgccatttcggactgggagcgagcgcggcgcaggcactgaaggcggcggcggggccagaggctcagcggctcccaggtgcgggagagaggcctgctgaaaatgactgaatataaacttgtggtagttggagctggtagcgtaggcaagagtgccttgacgatacagctaattcagaatcattttgtggacgaatatgatccaacaatagaggattcctacaggaagcaagtagtaattgatggagaaacctgtctcttggatattctcgacacagcaggtcaagaggagtacagtgcaatgagggaccagtacatgaggactggggagggctttctttgtgtatttgccataaataatactaaatcatttgaagatattcaccattatagagaacaaattaaaagagttaaggactctgaagatgtacctatggtcctagtaggaaataaatgtgatttgccttctagaacagtagacacaaaacaggctcaggacttagcaagaagttatggaattccttttattgaaacatcagcaaagacaagacagagagtggaggatgctttttatacattggtgagggagatccgacaatacagattgaaaaaaatcagcaaagaagaaaagactcctggctgtgtgaaaattaaaaaatgcattataatgtaatctgggtgttgatgatgccttctatacattagttcgagaaattcgaaaacataaagaaaagatgagcaaagatggtaaaaagaagaaaaagaagtcaaagacaaagtgtgtaattatgtaaatacaatttgtacttttttcttaaggcatactagtacaagtggtaatttttgtacattacactaaattattagcatttgttttagcattacctaatttttttcctgctccatgcagactgttagcttttaccttaaatgcttattttaaaatgacagtggaagtttttttttcctctaagtgccagtattcccagagttttggtttttgaactagcaatgcctgtgaaaaagaaactgaatacctaagatttctgtcttggggtttttggtgcatgcagttgattacttcttatttttcttaccaattgtgaatgttggtgtgaaacaaattaatgaagcttttgaatcatccctattctgtgttttatctagtcacataaatggattaattactaatttcagttgagaccttctaattggtttttactgaaacattgagggaacacaaatttatgggcttcctgatgatgattcttctaggcatcatgtcctatagtttgtcatccctgatgaatgtaaagttacactgttcacaaaggttttgtctcctttccactgctattagtcatggtcactctccccaaaatattatattttttctataaaaagaaaaaaatggaaaaaaattacaaggcaatggaaactattataaggccatttccttttcacattagataaattactataaagactcctaatagcttttcctgttaaggcagacccagtatgaaatggggattattatagcaaccattttggggctatatttacatgctactaaatttttataataattgaaaagattttaacaagtataaaaaattctcataggaattaaatgtagtctccctgtgtcagactgctctttcatagtataactttaaatcttttcttcaacttgagtctttgaagatagttttaattctgcttgtgacattaaaagattatttgggccagttatagcttattaggtgttgaagagaccaaggttgcaaggccaggccctgtgtgaacctttgagctttcatagagagtttcacagcatggactgtgtccccacggtcatccagtgttgtcatgcattggttagtcaaaatggggagggactagggcagtttggatagctcaacaagatacaatctcactctgtggtggtcctgctgacaaatcaagagcattgcttttgtttcttaagaaaacaaactcttttttaaaaattacttttaaatattaactcaaaagttgagattttggggtggtggtgtgccaagacattaattttttttttaaacaatgaagtgaaaaagttttacaatctctaggtttggctagttctcttaacactggttaaattaacattgcataaacacttttcaagtctgatccatatttaataatgctttaaaataaaaataaaaacaatccttttgataaatttaaaatgttacttattttaaaataaatgaagtgagatggcatggtgaggtgaaagtatcactggactaggaagaaggtgacttaggttctagataggtgtcttttaggactctgattttgaggacatcacttactatccatttcttcatgttaaaagaagtcatctcaaactcttagttttttttttttacaactatgtaatttatattccatttacataaggatacacttatttgtcaagctcagcacaatctgtaaatttttaacctatgttacaccatcttcagtgccagtcttgggcaaaattgtgcaagaggtgaagtttatatttgaatatccattctcgttttaggactcttcttccatattagtgtcatcttgcctccctaccttccacatgccccatgacttgatgcagttttaatacttgtaattcccctaaccataagatttactgctgctgtggatatctccatgaagttttcccactgagtcacatcagaaatgccctacatcttatttcctcagggctcaagagaatctgacagataccataaagggatttgacctaatcactaattttcaggtggtggctgatgctttgaacatctctttgctgcccaatccattagcgacagtaggatttttcaaacctggtatgaatagacagaaccctatccagtggaaggagaatttaataaagatagtgctgaaagaattccttaggtaatctataactaggactactcctggtaacagtaatacattccattgttttagtaaccagaaatcttcatgcaatgaaaaatactttaattcatgaagcttactttttttttttggtgtcagagtctcgctcttgtcacccaggctggaatgcagtggcgccatctcagctcactgcaacctccatctcccaggttcaagcgattctcgtgcctcggcctcctgagtagctgggattacaggcgtgtgccactacactcaactaatttttgtatttttaggagagacggggtttcaccctgttggccaggctggtctcgaactcctgacctcaagtgattcacccaccttggcctcataaacctgttttgcagaactcatttattcagcaaatatttattgagtgcctaccagatgccagtcaccgcacaaggcactgggtatatggtatccccaaacaagagacataatcccggtccttaggtagtgctagtgtggtctgtaatatcttactaaggcctttggtatacgacccagagataacacgatgcgtattttagttttgcaaagaaggggtttggtctctgtgccagctctataattgttttgctacgattccactgaaactcttcgatcaagctactttatgtaaatcacttcattgttttaaaggaataaacttgattatattgtttttttatttggcataactgtgattcttttaggacaattactgtacacattaaggtgtatgtcagatattcatattgacccaaatgtgtaatattccagttttctctgcataagtaattaaaatatacttaaaaattaatagttttatctgggtacaaataaacaggtgcctgaactagttcacagacaaggaaacttctatgtaaaaatcactatgatttctgaattgctatgtgaaactacagatctttggaacactgtttaggtagggtgttaagacttacacagtacctcgtttctacacagagaaagaaatggccatacttcaggaactgcagtgcttatgaggggatatttaggcctcttgaatttttgatgtagatgggcatttttttaaggtagtggttaattacctttatgtgaactttgaatggtttaacaaaagatttgtttttgtagagattttaaagggggagaattctagaaataaatgttacctaattattacagccttaaagacaaaaatccttgttgaagtttttttaaaaaaagctaaattacatagacttaggcattaacatgtttgtggaagaatatagcagacgtatattgtatcatttgagtgaatgttcccaagtaggcattctaggctctatttaactgagtcacactgcataggaatttagaacctaacttttataggttatcaaaactgttgtcaccattgcacaattttgtcctaatatatacatagaaactttgtggggcatgttaagttacagtttgcacaagttcatctcatttgtattccattgattttttttttcttctaaacattttttcttcaaacagtatataactttttttaggggatttttttttagacagcaaaaactatctgaagatttccatttgtcaaaaagtaatgatttcttgataattgtgtagtaatgttttttagaacccagcagttaccttaaagctgaatttatatttagtaacttctgtgttaatactggatagcatgaattctgcattgagaaactgaatagctgtcataaaatgaaactttctttctaaagaaagatactcacatgagttcttgaagaatagtcataactagattaagatctgtgttttagtttaatagtttgaagtgcctgtttgggataatgataggtaatttagatgaatttaggggaaaaaaaagttatctgcagatatgttgagggcccatctctccccccacacccccacagagctaactgggttacagtgttttatccgaaagtttccaattccactgtcttgtgttttcatgttgaaaatacttttgcatttttcctttgagtgccaatttcttactagtactatttcttaatgtaacatgtttacctggaatgtattttaactatttttgtatagtgtaaactgaaacatgcacattttgtacattgtgctttcttttgtgggacatatgcagtgtgatccagttgttttccatcatttggttgcgctgacctaggaatgttggtcatatcaaacattaaaaatgaccactcttttaattgaaattaacttttaaatgtttataggagtatgtgctgtgaagtgatctaaaatttgtaatatttttgtcatgaactgtactactcctaattattgtaatgtaataaaaatagttacagtgacaaaaaaaaaaaaaaa

SEQ ID NO: 22 - protein, 189 aa, Artificial sequence
  Synthetic Construct
MTEYKLVVVGAGSVGKSALTIQLIQNHFVDEYDPTIEDSYRKQVVIDGETCLLDILDTAGQEEYSAMRDQYMRTGEGFLCVFAINNTKSFEDIHHYREQIKRVKDSEDVPMVLVGNKCDLPSRTVDTKQAQDLARSYGIPFIETSAKTRQRVEDAFYTLVREIRQYRLKKISKEEKTPGCVKIKKCIIM

SEQ ID NO: 23 - DNA, 5436 bp, Artificial sequence
  mutated Homo sapiens v-Ki-ras2 Kirsten rat sarcoma viral oncogene homolog (KRAS), transcript variant a, mutation KRAS_G13V
  CDS (182)..(751)
ggccgcggcggcggaggcagcagcggcggcggcagtggcggcggcgaaggtggcggcggctcggccagtactcccggcccccgccatttcggactgggagcgagcgcggcgcaggcactgaaggcggcggcggggccagaggctcagcggctcccaggtgcgggagagaggcctgctgaaaatgactgaatataaacttgtggtagttggagctggtgtcgtaggcaagagtgccttgacgatacagctaattcagaatcattttgtggacgaatatgatccaacaatagaggattcctacaggaagcaagtagtaattgatggagaaacctgtctcttggatattctcgacacagcaggtcaagaggagtacagtgcaatgagggaccagtacatgaggactggggagggctttctttgtgtatttgccataaataatactaaatcatttgaagatattcaccattatagagaacaaattaaaagagttaaggactctgaagatgtacctatggtcctagtaggaaataaatgtgatttgccttctagaacagtagacacaaaacaggctcaggacttagcaagaagttatggaattccttttattgaaacatcagcaaagacaagacagagagtggaggatgctttttatacattggtgagggagatccgacaatacagattgaaaaaaatcagcaaagaagaaaagactcctggctgtgtgaaaattaaaaaatgcattataatgtaatctgggtgttgatgatgccttctatacattagttcgagaaattcgaaaacataaagaaaagatgagcaaagatggtaaaaagaagaaaaagaagtcaaagacaaagtgtgtaattatgtaaatacaatttgtacttttttcttaaggcatactagtacaagtggtaatttttgtacattacactaaattattagcatttgttttagcattacctaatttttttcctgctccatgcagactgttagcttttaccttaaatgcttattttaaaatgacagtggaagtttttttttcctctaagtgccagtattcccagagttttggtttttgaactagcaatgcctgtgaaaaagaaactgaatacctaagatttctgtcttggggtttttggtgcatgcagttgattacttcttatttttcttaccaattgtgaatgttggtgtgaaacaaattaatgaagcttttgaatcatccctattctgtgttttatctagtcacataaatggattaattactaatttcagttgagaccttctaattggtttttactgaaacattgagggaacacaaatttatgggcttcctgatgatgattcttctaggcatcatgtcctatagtttgtcatccctgatgaatgtaaagttacactgttcacaaaggttttgtctcctttccactgctattagtcatggtcactctccccaaaatattatattttttctataaaaagaaaaaaatggaaaaaaattacaaggcaatggaaactattataaggccatttccttttcacattagataaattactataaagactcctaatagcttttcctgttaaggcagacccagtatgaaatggggattattatagcaaccattttggggctatatttacatgctactaaatttttataataattgaaaagattttaacaagtataaaaaattctcataggaattaaatgtagtctccctgtgtcagactgctctttcatagtataactttaaatcttttcttcaacttgagtctttgaagatagttttaattctgcttgtgacattaaaagattatttgggccagttatagcttattaggtgttgaagagaccaaggttgcaaggccaggccctgtgtgaacctttgagctttcatagagagtttcacagcatggactgtgtccccacggtcatccagtgttgtcatgcattggttagtcaaaatggggagggactagggcagtttggatagctcaacaagatacaatctcactctgtggtggtcctgctgacaaatcaagagcattgcttttgtttcttaagaaaacaaactcttttttaaaaattacttttaaatattaactcaaaagttgagattttggggtggtggtgtgccaagacattaattttttttttaaacaatgaagtgaaaaagttttacaatctctaggtttggctagttctcttaacactggttaaattaacattgcataaacacttttcaagtctgatccatatttaataatgctttaaaataaaaataaaaacaatccttttgataaatttaaaatgttacttattttaaaataaatgaagtgagatggcatggtgaggtgaaagtatcactggactaggaagaaggtgacttaggttctagataggtgtcttttaggactctgattttgaggacatcacttactatccatttcttcatgttaaaagaagtcatctcaaactcttagttttttttttttacaactatgtaatttatattccatttacataaggatacacttatttgtcaagctcagcacaatctgtaaatttttaacctatgttacaccatcttcagtgccagtcttgggcaaaattgtgcaagaggtgaagtttatatttgaatatccattctcgttttaggactcttcttccatattagtgtcatcttgcctccctaccttccacatgccccatgacttgatgcagttttaatacttgtaattcccctaaccataagatttactgctgctgtggatatctccatgaagttttcccactgagtcacatcagaaatgccctacatcttatttcctcagggctcaagagaatctgacagataccataaagggatttgacctaatcactaattttcaggtggtggctgatgctttgaacatctctttgctgcccaatccattagcgacagtaggatttttcaaacctggtatgaatagacagaaccctatccagtggaaggagaatttaataaagatagtgctgaaagaattccttaggtaatctataactaggactactcctggtaacagtaatacattccattgttttagtaaccagaaatcttcatgcaatgaaaaatactttaattcatgaagcttactttttttttttggtgtcagagtctcgctcttgtcacccaggctggaatgcagtggcgccatctcagctcactgcaacctccatctcccaggttcaagcgattctcgtgcctcggcctcctgagtagctgggattacaggcgtgtgccactacactcaactaatttttgtatttttaggagagacggggtttcaccctgttggccaggctggtctcgaactcctgacctcaagtgattcacccaccttggcctcataaacctgttttgcagaactcatttattcagcaaatatttattgagtgcctaccagatgccagtcaccgcacaaggcactgggtatatggtatccccaaacaagagacataatcccggtccttaggtagtgctagtgtggtctgtaatatcttactaaggcctttggtatacgacccagagataacacgatgcgtattttagttttgcaaagaaggggtttggtctctgtgccagctctataattgttttgctacgattccactgaaactcttcgatcaagctactttatgtaaatcacttcattgttttaaaggaataaacttgattatattgtttttttatttggcataactgtgattcttttaggacaattactgtacacattaaggtgtatgtcagatattcatattgacccaaatgtgtaatattccagttttctctgcataagtaattaaaatatacttaaaaattaatagttttatctgggtacaaataaacaggtgcctgaactagttcacagacaaggaaacttctatgtaaaaatcactatgatttctgaattgctatgtgaaactacagatctttggaacactgtttaggtagggtgttaagacttacacagtacctcgtttctacacagagaaagaaatggccatacttcaggaactgcagtgcttatgaggggatatttaggcctcttgaatttttgatgtagatgggcatttttttaaggtagtggttaattacctttatgtgaactttgaatggtttaacaaaagatttgtttttgtagagattttaaagggggagaattctagaaataaatgttacctaattattacagccttaaagacaaaaatccttgttgaagtttttttaaaaaaagctaaattacatagacttaggcattaacatgtttgtggaagaatatagcagacgtatattgtatcatttgagtgaatgttcccaagtaggcattctaggctctatttaactgagtcacactgcataggaatttagaacctaacttttataggttatcaaaactgttgtcaccattgcacaattttgtcctaatatatacatagaaactttgtggggcatgttaagttacagtttgcacaagttcatctcatttgtattccattgattttttttttcttctaaacattttttcttcaaacagtatataactttttttaggggatttttttttagacagcaaaaactatctgaagatttccatttgtcaaaaagtaatgatttcttgataattgtgtagtaatgttttttagaacccagcagttaccttaaagctgaatttatatttagtaacttctgtgttaatactggatagcatgaattctgcattgagaaactgaatagctgtcataaaatgaaactttctttctaaagaaagatactcacatgagttcttgaagaatagtcataactagattaagatctgtgttttagtttaatagtttgaagtgcctgtttgggataatgataggtaatttagatgaatttaggggaaaaaaaagttatctgcagatatgttgagggcccatctctccccccacacccccacagagctaactgggttacagtgttttatccgaaagtttccaattccactgtcttgtgttttcatgttgaaaatacttttgcatttttcctttgagtgccaatttcttactagtactatttcttaatgtaacatgtttacctggaatgtattttaactatttttgtatagtgtaaactgaaacatgcacattttgtacattgtgctttcttttgtgggacatatgcagtgtgatccagttgttttccatcatttggttgcgctgacctaggaatgttggtcatatcaaacattaaaaatgaccactcttttaattgaaattaacttttaaatgtttataggagtatgtgctgtgaagtgatctaaaatttgtaatatttttgtcatgaactgtactactcctaattattgtaatgtaataaaaatagttacagtgacaaaaaaaaaaaaaaa

SEQ ID NO: 24 - protein, 189 aa, Artificial sequence
  Synthetic Construct
MTEYKLVVVGAGVVGKSALTIQLIQNHFVDEYDPTIEDSYRKQVVIDGETCLLDILDTAGQEEYSAMRDQYMRTGEGFLCVFAINNTKSFEDIHHYREQIKRVKDSEDVPMVLVGNKCDLPSRTVDTKQAQDLARSYGIPFIETSAKTRQRVEDAFYTLVREIRQYRLKKISKEEKTPGCVKIKKCIIM

SEQ ID NO: 25 - DNA, 5436 bp, Artificial sequence
  /note="Description of Artificial Sequence: mutated Homo sapiens v-Ki-ras2 Kirsten rat sarcoma viral oncogene homolog (KRAS), transcript variant a, mutation KRAS_A59T"
  CDS (182)..(751)
ggccgcggcggcggaggcagcagcggcggcggcagtggcggcggcgaaggtggcggcggctcggccagtactcccggcccccgccatttcggactgggagcgagcgcggcgcaggcactgaaggcggcggcggggccagaggctcagcggctcccaggtgcgggagagaggcctgctgaaaatgactgaatataaacttgtggtagttggagctggtggcgtaggcaagagtgccttgacgatacagctaattcagaatcattttgtggacgaatatgatccaacaatagaggattcctacaggaagcaagtagtaattgatggagaaacctgtctcttggatattctcgacacaacaggtcaagaggagtacagtgcaatgagggaccagtacatgaggactggggagggctttctttgtgtatttgccataaataatactaaatcatttgaagatattcaccattatagagaacaaattaaaagagttaaggactctgaagatgtacctatggtcctagtaggaaataaatgtgatttgccttctagaacagtagacacaaaacaggctcaggacttagcaagaagttatggaattccttttattgaaacatcagcaaagacaagacagagagtggaggatgctttttatacattggtgagggagatccgacaatacagattgaaaaaaatcagcaaagaagaaaagactcctggctgtgtgaaaattaaaaaatgcattataatgtaatctgggtgttgatgatgccttctatacattagttcgagaaattcgaaaacataaagaaaagatgagcaaagatggtaaaaagaagaaaaagaagtcaaagacaaagtgtgtaattatgtaaatacaatttgtacttttttcttaaggcatactagtacaagtggtaatttttgtacattacactaaattattagcatttgttttagcattacctaatttttttcctgctccatgcagactgttagcttttaccttaaatgcttattttaaaatgacagtggaagtttttttttcctctaagtgccagtattcccagagttttggtttttgaactagcaatgcctgtgaaaaagaaactgaatacctaagatttctgtcttggggtttttggtgcatgcagttgattacttcttatttttcttaccaattgtgaatgttggtgtgaaacaaattaatgaagcttttgaatcatccctattctgtgttttatctagtcacataaatggattaattactaatttcagttgagaccttctaattggtttttactgaaacattgagggaacacaaatttatgggcttcctgatgatgattcttctaggcatcatgtcctatagtttgtcatccctgatgaatgtaaagttacactgttcacaaaggttttgtctcctttccactgctattagtcatggtcactctccccaaaatattatattttttctataaaaagaaaaaaatggaaaaaaattacaaggcaatggaaactattataaggccatttccttttcacattagataaattactataaagactcctaatagcttttcctgttaaggcagacccagtatgaaatggggattattatagcaaccattttggggctatatttacatgctactaaatttttataataattgaaaagattttaacaagtataaaaaattctcataggaattaaatgtagtctccctgtgtcagactgctctttcatagtataactttaaatcttttcttcaacttgagtctttgaagatagttttaattctgcttgtgacattaaaagattatttgggccagttatagcttattaggtgttgaagagaccaaggttgcaaggccaggccctgtgtgaacctttgagctttcatagagagtttcacagcatggactgtgtccccacggtcatccagtgttgtcatgcattggttagtcaaaatggggagggactagggcagtttggatagctcaacaagatacaatctcactctgtggtggtcctgctgacaaatcaagagcattgcttttgtttcttaagaaaacaaactcttttttaaaaattacttttaaatattaactcaaaagttgagattttggggtggtggtgtgccaagacattaattttttttttaaacaatgaagtgaaaaagttttacaatctctaggtttggctagttctcttaacactggttaaattaacattgcataaacacttttcaagtctgatccatatttaataatgctttaaaataaaaataaaaacaatccttttgataaatttaaaatgttacttattttaaaataaatgaagtgagatggcatggtgaggtgaaagtatcactggactaggaagaaggtgacttaggttctagataggtgtcttttaggactctgattttgaggacatcacttactatccatttcttcatgttaaaagaagtcatctcaaactcttagttttttttttttacaactatgtaatttatattccatttacataaggatacacttatttgtcaagctcagcacaatctgtaaatttttaacctatgttacaccatcttcagtgccagtcttgggcaaaattgtgcaagaggtgaagtttatatttgaatatccattctcgttttaggactcttcttccatattagtgtcatcttgcctccctaccttccacatgccccatgacttgatgcagttttaatacttgtaattcccctaaccataagatttactgctgctgtggatatctccatgaagttttcccactgagtcacatcagaaatgccctacatcttatttcctcagggctcaagagaatctgacagataccataaagggatttgacctaatcactaattttcaggtggtggctgatgctttgaacatctctttgctgcccaatccattagcgacagtaggatttttcaaacctggtatgaatagacagaaccctatccagtggaaggagaatttaataaagatagtgctgaaagaattccttaggtaatctataactaggactactcctggtaacagtaatacattccattgttttagtaaccagaaatcttcatgcaatgaaaaatactttaattcatgaagcttactttttttttttggtgtcagagtctcgctcttgtcacccaggctggaatgcagtggcgccatctcagctcactgcaacctccatctcccaggttcaagcgattctcgtgcctcggcctcctgagtagctgggattacaggcgtgtgccactacactcaactaatttttgtatttttaggagagacggggtttcaccctgttggccaggctggtctcgaactcctgacctcaagtgattcacccaccttggcctcataaacctgttttgcagaactcatttattcagcaaatatttattgagtgcctaccagatgccagtcaccgcacaaggcactgggtatatggtatccccaaacaagagacataatcccggtccttaggtagtgctagtgtggtctgtaatatcttactaaggcctttggtatacgacccagagataacacgatgcgtattttagttttgcaaagaaggggtttggtctctgtgccagctctataattgttttgctacgattccactgaaactcttcgatcaagctactttatgtaaatcacttcattgttttaaaggaataaacttgattatattgtttttttatttggcataactgtgattcttttaggacaattactgtacacattaaggtgtatgtcagatattcatattgacccaaatgtgtaatattccagttttctctgcataagtaattaaaatatacttaaaaattaatagttttatctgggtacaaataaacaggtgcctgaactagttcacagacaaggaaacttctatgtaaaaatcactatgatttctgaattgctatgtgaaactacagatctttggaacactgtttaggtagggtgttaagacttacacagtacctcgtttctacacagagaaagaaatggccatacttcaggaactgcagtgcttatgaggggatatttaggcctcttgaatttttgatgtagatgggcatttttttaaggtagtggttaattacctttatgtgaactttgaatggtttaacaaaagatttgtttttgtagagattttaaagggggagaattctagaaataaatgttacctaattattacagccttaaagacaaaaatccttgttgaagtttttttaaaaaaagctaaattacatagacttaggcattaacatgtttgtggaagaatatagcagacgtatattgtatcatttgagtgaatgttcccaagtaggcattctaggctctatttaactgagtcacactgcataggaatttagaacctaacttttataggttatcaaaactgttgtcaccattgcacaattttgtcctaatatatacatagaaactttgtggggcatgttaagttacagtttgcacaagttcatctcatttgtattccattgattttttttttcttctaaacattttttcttcaaacagtatataactttttttaggggatttttttttagacagcaaaaactatctgaagatttccatttgtcaaaaagtaatgatttcttgataattgtgtagtaatgttttttagaacccagcagttaccttaaagctgaatttatatttagtaacttctgtgttaatactggatagcatgaattctgcattgagaaactgaatagctgtcataaaatgaaactttctttctaaagaaagatactcacatgagttcttgaagaatagtcataactagattaagatctgtgttttagtttaatagtttgaagtgcctgtttgggataatgataggtaatttagatgaatttaggggaaaaaaaagttatctgcagatatgttgagggcccatctctccccccacacccccacagagctaactgggttacagtgttttatccgaaagtttccaattccactgtcttgtgttttcatgttgaaaatacttttgcatttttcctttgagtgccaatttcttactagtactatttcttaatgtaacatgtttacctggaatgtattttaactatttttgtatagtgtaaactgaaacatgcacattttgtacattgtgctttcttttgtgggacatatgcagtgtgatccagttgttttccatcatttggttgcgctgacctaggaatgttggtcatatcaaacattaaaaatgaccactcttttaattgaaattaacttttaaatgtttataggagtatgtgctgtgaagtgatctaaaatttgtaatatttttgtcatgaactgtactactcctaattattgtaatgtaataaaaatagttacagtgacaaaaaaaaaaaaaaa

SEQ ID NO: 26 - protein, 189 aa, Artificial sequence
  Synthetic Construct
MTEYKLVVVGAGGVGKSALTIQLIQNHFVDEYDPTIEDSYRKQVVIDGETCLLDILDTTGQEEYSAMRDQYMRTGEGFLCVFAINNTKSFEDIHHYREQIKRVKDSEDVPMVLVGNKCDLPSRTVDTKQAQDLARSYGIPFIETSAKTRQRVEDAFYTLVREIRQYRLKKISKEEKTPGCVKIKKCIIM

SEQ ID NO: 27 - DNA, 5436 bp, Artificial sequence
  /note="Description of Artificial Sequence: mutated Homo sapiens v-Ki-ras2 Kirsten rat sarcoma viral oncogene homolog (KRAS), transcript variant a, mutation KRAS_ Q61E"
  CDS (182)..(751)
ggccgcggcggcggaggcagcagcggcggcggcagtggcggcggcgaaggtggcggcggctcggccagtactcccggcccccgccatttcggactgggagcgagcgcggcgcaggcactgaaggcggcggcggggccagaggctcagcggctcccaggtgcgggagagaggcctgctgaaaatgactgaatataaacttgtggtagttggagctggtggcgtaggcaagagtgccttgacgatacagctaattcagaatcattttgtggacgaatatgatccaacaatagaggattcctacaggaagcaagtagtaattgatggagaaacctgtctcttggatattctcgacacagcaggtgaagaggagtacagtgcaatgagggaccagtacatgaggactggggagggctttctttgtgtatttgccataaataatactaaatcatttgaagatattcaccattatagagaacaaattaaaagagttaaggactctgaagatgtacctatggtcctagtaggaaataaatgtgatttgccttctagaacagtagacacaaaacaggctcaggacttagcaagaagttatggaattccttttattgaaacatcagcaaagacaagacagagagtggaggatgctttttatacattggtgagggagatccgacaatacagattgaaaaaaatcagcaaagaagaaaagactcctggctgtgtgaaaattaaaaaatgcattataatgtaatctgggtgttgatgatgccttctatacattagttcgagaaattcgaaaacataaagaaaagatgagcaaagatggtaaaaagaagaaaaagaagtcaaagacaaagtgtgtaattatgtaaatacaatttgtacttttttcttaaggcatactagtacaagtggtaatttttgtacattacactaaattattagcatttgttttagcattacctaatttttttcctgctccatgcagactgttagcttttaccttaaatgcttattttaaaatgacagtggaagtttttttttcctctaagtgccagtattcccagagttttggtttttgaactagcaatgcctgtgaaaaagaaactgaatacctaagatttctgtcttggggtttttggtgcatgcagttgattacttcttatttttcttaccaattgtgaatgttggtgtgaaacaaattaatgaagcttttgaatcatccctattctgtgttttatctagtcacataaatggattaattactaatttcagttgagaccttctaattggtttttactgaaacattgagggaacacaaatttatgggcttcctgatgatgattcttctaggcatcatgtcctatagtttgtcatccctgatgaatgtaaagttacactgttcacaaaggttttgtctcctttccactgctattagtcatggtcactctccccaaaatattatattttttctataaaaagaaaaaaatggaaaaaaattacaaggcaatggaaactattataaggccatttccttttcacattagataaattactataaagactcctaatagcttttcctgttaaggcagacccagtatgaaatggggattattatagcaaccattttggggctatatttacatgctactaaatttttataataattgaaaagattttaacaagtataaaaaattctcataggaattaaatgtagtctccctgtgtcagactgctctttcatagtataactttaaatcttttcttcaacttgagtctttgaagatagttttaattctgcttgtgacattaaaagattatttgggccagttatagcttattaggtgttgaagagaccaaggttgcaaggccaggccctgtgtgaacctttgagctttcatagagagtttcacagcatggactgtgtccccacggtcatccagtgttgtcatgcattggttagtcaaaatggggagggactagggcagtttggatagctcaacaagatacaatctcactctgtggtggtcctgctgacaaatcaagagcattgcttttgtttcttaagaaaacaaactcttttttaaaaattacttttaaatattaactcaaaagttgagattttggggtggtggtgtgccaagacattaattttttttttaaacaatgaagtgaaaaagttttacaatctctaggtttggctagttctcttaacactggttaaattaacattgcataaacacttttcaagtctgatccatatttaataatgctttaaaataaaaataaaaacaatccttttgataaatttaaaatgttacttattttaaaataaatgaagtgagatggcatggtgaggtgaaagtatcactggactaggaagaaggtgacttaggttctagataggtgtcttttaggactctgattttgaggacatcacttactatccatttcttcatgttaaaagaagtcatctcaaactcttagttttttttttttacaactatgtaatttatattccatttacataaggatacacttatttgtcaagctcagcacaatctgtaaatttttaacctatgttacaccatcttcagtgccagtcttgggcaaaattgtgcaagaggtgaagtttatatttgaatatccattctcgttttaggactcttcttccatattagtgtcatcttgcctccctaccttccacatgccccatgacttgatgcagttttaatacttgtaattcccctaaccataagatttactgctgctgtggatatctccatgaagttttcccactgagtcacatcagaaatgccctacatcttatttcctcagggctcaagagaatctgacagataccataaagggatttgacctaatcactaattttcaggtggtggctgatgctttgaacatctctttgctgcccaatccattagcgacagtaggatttttcaaacctggtatgaatagacagaaccctatccagtggaaggagaatttaataaagatagtgctgaaagaattccttaggtaatctataactaggactactcctggtaacagtaatacattccattgttttagtaaccagaaatcttcatgcaatgaaaaatactttaattcatgaagcttactttttttttttggtgtcagagtctcgctcttgtcacccaggctggaatgcagtggcgccatctcagctcactgcaacctccatctcccaggttcaagcgattctcgtgcctcggcctcctgagtagctgggattacaggcgtgtgccactacactcaactaatttttgtatttttaggagagacggggtttcaccctgttggccaggctggtctcgaactcctgacctcaagtgattcacccaccttggcctcataaacctgttttgcagaactcatttattcagcaaatatttattgagtgcctaccagatgccagtcaccgcacaaggcactgggtatatggtatccccaaacaagagacataatcccggtccttaggtagtgctagtgtggtctgtaatatcttactaaggcctttggtatacgacccagagataacacgatgcgtattttagttttgcaaagaaggggtttggtctctgtgccagctctataattgttttgctacgattccactgaaactcttcgatcaagctactttatgtaaatcacttcattgttttaaaggaataaacttgattatattgtttttttatttggcataactgtgattcttttaggacaattactgtacacattaaggtgtatgtcagatattcatattgacccaaatgtgtaatattccagttttctctgcataagtaattaaaatatacttaaaaattaatagttttatctgggtacaaataaacaggtgcctgaactagttcacagacaaggaaacttctatgtaaaaatcactatgatttctgaattgctatgtgaaactacagatctttggaacactgtttaggtagggtgttaagacttacacagtacctcgtttctacacagagaaagaaatggccatacttcaggaactgcagtgcttatgaggggatatttaggcctcttgaatttttgatgtagatgggcatttttttaaggtagtggttaattacctttatgtgaactttgaatggtttaacaaaagatttgtttttgtagagattttaaagggggagaattctagaaataaatgttacctaattattacagccttaaagacaaaaatccttgttgaagtttttttaaaaaaagctaaattacatagacttaggcattaacatgtttgtggaagaatatagcagacgtatattgtatcatttgagtgaatgttcccaagtaggcattctaggctctatttaactgagtcacactgcataggaatttagaacctaacttttataggttatcaaaactgttgtcaccattgcacaattttgtcctaatatatacatagaaactttgtggggcatgttaagttacagtttgcacaagttcatctcatttgtattccattgattttttttttcttctaaacattttttcttcaaacagtatataactttttttaggggatttttttttagacagcaaaaactatctgaagatttccatttgtcaaaaagtaatgatttcttgataattgtgtagtaatgttttttagaacccagcagttaccttaaagctgaatttatatttagtaacttctgtgttaatactggatagcatgaattctgcattgagaaactgaatagctgtcataaaatgaaactttctttctaaagaaagatactcacatgagttcttgaagaatagtcataactagattaagatctgtgttttagtttaatagtttgaagtgcctgtttgggataatgataggtaatttagatgaatttaggggaaaaaaaagttatctgcagatatgttgagggcccatctctccccccacacccccacagagctaactgggttacagtgttttatccgaaagtttccaattccactgtcttgtgttttcatgttgaaaatacttttgcatttttcctttgagtgccaatttcttactagtactatttcttaatgtaacatgtttacctggaatgtattttaactatttttgtatagtgtaaactgaaacatgcacattttgtacattgtgctttcttttgtgggacatatgcagtgtgatccagttgttttccatcatttggttgcgctgacctaggaatgttggtcatatcaaacattaaaaatgaccactcttttaattgaaattaacttttaaatgtttataggagtatgtgctgtgaagtgatctaaaatttgtaatatttttgtcatgaactgtactactcctaattattgtaatgtaataaaaatagttacagtgacaaaaaaaaaaaaaaa

SEQ ID NO: 28 - protein, 189 aa, Artificial sequence
  Synthetic Construct
MTEYKLVVVGAGGVGKSALTIQLIQNHFVDEYDPTIEDSYRKQVVIDGETCLLDILDTAGEEEYSAMRDQYMRTGEGFLCVFAINNTKSFEDIHHYREQIKRVKDSEDVPMVLVGNKCDLPSRTVDTKQAQDLARSYGIPFIETSAKTRQRVEDAFYTLVREIRQYRLKKISKEEKTPGCVKIKKCIIM

SEQ ID NO: 29 - DNA, 5436 bp, Artificial sequence
  /note="Description of Artificial Sequence: mutated Homo sapiens v-Ki-ras2 Kirsten rat sarcoma viral oncogene homolog (KRAS), transcript variant a, mutation KRAS_ Q61H"
  CDS (182)..(751)
ggccgcggcggcggaggcagcagcggcggcggcagtggcggcggcgaaggtggcggcggctcggccagtactcccggcccccgccatttcggactgggagcgagcgcggcgcaggcactgaaggcggcggcggggccagaggctcagcggctcccaggtgcgggagagaggcctgctgaaaatgactgaatataaacttgtggtagttggagctggtggcgtaggcaagagtgccttgacgatacagctaattcagaatcattttgtggacgaatatgatccaacaatagaggattcctacaggaagcaagtagtaattgatggagaaacctgtctcttggatattctcgacacagcaggtcatgaggagtacagtgcaatgagggaccagtacatgaggactggggagggctttctttgtgtatttgccataaataatactaaatcatttgaagatattcaccattatagagaacaaattaaaagagttaaggactctgaagatgtacctatggtcctagtaggaaataaatgtgatttgccttctagaacagtagacacaaaacaggctcaggacttagcaagaagttatggaattccttttattgaaacatcagcaaagacaagacagagagtggaggatgctttttatacattggtgagggagatccgacaatacagattgaaaaaaatcagcaaagaagaaaagactcctggctgtgtgaaaattaaaaaatgcattataatgtaatctgggtgttgatgatgccttctatacattagttcgagaaattcgaaaacataaagaaaagatgagcaaagatggtaaaaagaagaaaaagaagtcaaagacaaagtgtgtaattatgtaaatacaatttgtacttttttcttaaggcatactagtacaagtggtaatttttgtacattacactaaattattagcatttgttttagcattacctaatttttttcctgctccatgcagactgttagcttttaccttaaatgcttattttaaaatgacagtggaagtttttttttcctctaagtgccagtattcccagagttttggtttttgaactagcaatgcctgtgaaaaagaaactgaatacctaagatttctgtcttggggtttttggtgcatgcagttgattacttcttatttttcttaccaattgtgaatgttggtgtgaaacaaattaatgaagcttttgaatcatccctattctgtgttttatctagtcacataaatggattaattactaatttcagttgagaccttctaattggtttttactgaaacattgagggaacacaaatttatgggcttcctgatgatgattcttctaggcatcatgtcctatagtttgtcatccctgatgaatgtaaagttacactgttcacaaaggttttgtctcctttccactgctattagtcatggtcactctccccaaaatattatattttttctataaaaagaaaaaaatggaaaaaaattacaaggcaatggaaactattataaggccatttccttttcacattagataaattactataaagactcctaatagcttttcctgttaaggcagacccagtatgaaatggggattattatagcaaccattttggggctatatttacatgctactaaatttttataataattgaaaagattttaacaagtataaaaaattctcataggaattaaatgtagtctccctgtgtcagactgctctttcatagtataactttaaatcttttcttcaacttgagtctttgaagatagttttaattctgcttgtgacattaaaagattatttgggccagttatagcttattaggtgttgaagagaccaaggttgcaaggccaggccctgtgtgaacctttgagctttcatagagagtttcacagcatggactgtgtccccacggtcatccagtgttgtcatgcattggttagtcaaaatggggagggactagggcagtttggatagctcaacaagatacaatctcactctgtggtggtcctgctgacaaatcaagagcattgcttttgtttcttaagaaaacaaactcttttttaaaaattacttttaaatattaactcaaaagttgagattttggggtggtggtgtgccaagacattaattttttttttaaacaatgaagtgaaaaagttttacaatctctaggtttggctagttctcttaacactggttaaattaacattgcataaacacttttcaagtctgatccatatttaataatgctttaaaataaaaataaaaacaatccttttgataaatttaaaatgttacttattttaaaataaatgaagtgagatggcatggtgaggtgaaagtatcactggactaggaagaaggtgacttaggttctagataggtgtcttttaggactctgattttgaggacatcacttactatccatttcttcatgttaaaagaagtcatctcaaactcttagttttttttttttacaactatgtaatttatattccatttacataaggatacacttatttgtcaagctcagcacaatctgtaaatttttaacctatgttacaccatcttcagtgccagtcttgggcaaaattgtgcaagaggtgaagtttatatttgaatatccattctcgttttaggactcttcttccatattagtgtcatcttgcctccctaccttccacatgccccatgacttgatgcagttttaatacttgtaattcccctaaccataagatttactgctgctgtggatatctccatgaagttttcccactgagtcacatcagaaatgccctacatcttatttcctcagggctcaagagaatctgacagataccataaagggatttgacctaatcactaattttcaggtggtggctgatgctttgaacatctctttgctgcccaatccattagcgacagtaggatttttcaaacctggtatgaatagacagaaccctatccagtggaaggagaatttaataaagatagtgctgaaagaattccttaggtaatctataactaggactactcctggtaacagtaatacattccattgttttagtaaccagaaatcttcatgcaatgaaaaatactttaattcatgaagcttactttttttttttggtgtcagagtctcgctcttgtcacccaggctggaatgcagtggcgccatctcagctcactgcaacctccatctcccaggttcaagcgattctcgtgcctcggcctcctgagtagctgggattacaggcgtgtgccactacactcaactaatttttgtatttttaggagagacggggtttcaccctgttggccaggctggtctcgaactcctgacctcaagtgattcacccaccttggcctcataaacctgttttgcagaactcatttattcagcaaatatttattgagtgcctaccagatgccagtcaccgcacaaggcactgggtatatggtatccccaaacaagagacataatcccggtccttaggtagtgctagtgtggtctgtaatatcttactaaggcctttggtatacgacccagagataacacgatgcgtattttagttttgcaaagaaggggtttggtctctgtgccagctctataattgttttgctacgattccactgaaactcttcgatcaagctactttatgtaaatcacttcattgttttaaaggaataaacttgattatattgtttttttatttggcataactgtgattcttttaggacaattactgtacacattaaggtgtatgtcagatattcatattgacccaaatgtgtaatattccagttttctctgcataagtaattaaaatatacttaaaaattaatagttttatctgggtacaaataaacaggtgcctgaactagttcacagacaaggaaacttctatgtaaaaatcactatgatttctgaattgctatgtgaaactacagatctttggaacactgtttaggtagggtgttaagacttacacagtacctcgtttctacacagagaaagaaatggccatacttcaggaactgcagtgcttatgaggggatatttaggcctcttgaatttttgatgtagatgggcatttttttaaggtagtggttaattacctttatgtgaactttgaatggtttaacaaaagatttgtttttgtagagattttaaagggggagaattctagaaataaatgttacctaattattacagccttaaagacaaaaatccttgttgaagtttttttaaaaaaagctaaattacatagacttaggcattaacatgtttgtggaagaatatagcagacgtatattgtatcatttgagtgaatgttcccaagtaggcattctaggctctatttaactgagtcacactgcataggaatttagaacctaacttttataggttatcaaaactgttgtcaccattgcacaattttgtcctaatatatacatagaaactttgtggggcatgttaagttacagtttgcacaagttcatctcatttgtattccattgattttttttttcttctaaacattttttcttcaaacagtatataactttttttaggggatttttttttagacagcaaaaactatctgaagatttccatttgtcaaaaagtaatgatttcttgataattgtgtagtaatgttttttagaacccagcagttaccttaaagctgaatttatatttagtaacttctgtgttaatactggatagcatgaattctgcattgagaaactgaatagctgtcataaaatgaaactttctttctaaagaaagatactcacatgagttcttgaagaatagtcataactagattaagatctgtgttttagtttaatagtttgaagtgcctgtttgggataatgataggtaatttagatgaatttaggggaaaaaaaagttatctgcagatatgttgagggcccatctctccccccacacccccacagagctaactgggttacagtgttttatccgaaagtttccaattccactgtcttgtgttttcatgttgaaaatacttttgcatttttcctttgagtgccaatttcttactagtactatttcttaatgtaacatgtttacctggaatgtattttaactatttttgtatagtgtaaactgaaacatgcacattttgtacattgtgctttcttttgtgggacatatgcagtgtgatccagttgttttccatcatttggttgcgctgacctaggaatgttggtcatatcaaacattaaaaatgaccactcttttaattgaaattaacttttaaatgtttataggagtatgtgctgtgaagtgatctaaaatttgtaatatttttgtcatgaactgtactactcctaattattgtaatgtaataaaaatagttacagtgacaaaaaaaaaaaaaaa

SEQ ID NO: 30 - protein, 189 aa, Artificial sequence
  Synthetic Construct
MTEYKLVVVGAGGVGKSALTIQLIQNHFVDEYDPTIEDSYRKQVVIDGETCLLDILDTAGHEEYSAMRDQYMRTGEGFLCVFAINNTKSFEDIHHYREQIKRVKDSEDVPMVLVGNKCDLPSRTVDTKQAQDLARSYGIPFIETSAKTRQRVEDAFYTLVREIRQYRLKKISKEEKTPGCVKIKKCIIM

SEQ ID NO: 31 - DNA, 5436 bp, Artificial sequence
  /note="Description of Artificial Sequence: mutated Homo sapiens v-Ki-ras2 Kirsten rat sarcoma viral oncogene homolog (KRAS), transcript variant a, mutation KRAS_ Q61H"
  CDS (182)..(751)
ggccgcggcggcggaggcagcagcggcggcggcagtggcggcggcgaaggtggcggcggctcggccagtactcccggcccccgccatttcggactgggagcgagcgcggcgcaggcactgaaggcggcggcggggccagaggctcagcggctcccaggtgcgggagagaggcctgctgaaaatgactgaatataaacttgtggtagttggagctggtggcgtaggcaagagtgccttgacgatacagctaattcagaatcattttgtggacgaatatgatccaacaatagaggattcctacaggaagcaagtagtaattgatggagaaacctgtctcttggatattctcgacacagcaggtcacgaggagtacagtgcaatgagggaccagtacatgaggactggggagggctttctttgtgtatttgccataaataatactaaatcatttgaagatattcaccattatagagaacaaattaaaagagttaaggactctgaagatgtacctatggtcctagtaggaaataaatgtgatttgccttctagaacagtagacacaaaacaggctcaggacttagcaagaagttatggaattccttttattgaaacatcagcaaagacaagacagagagtggaggatgctttttatacattggtgagggagatccgacaatacagattgaaaaaaatcagcaaagaagaaaagactcctggctgtgtgaaaattaaaaaatgcattataatgtaatctgggtgttgatgatgccttctatacattagttcgagaaattcgaaaacataaagaaaagatgagcaaagatggtaaaaagaagaaaaagaagtcaaagacaaagtgtgtaattatgtaaatacaatttgtacttttttcttaaggcatactagtacaagtggtaatttttgtacattacactaaattattagcatttgttttagcattacctaatttttttcctgctccatgcagactgttagcttttaccttaaatgcttattttaaaatgacagtggaagtttttttttcctctaagtgccagtattcccagagttttggtttttgaactagcaatgcctgtgaaaaagaaactgaatacctaagatttctgtcttggggtttttggtgcatgcagttgattacttcttatttttcttaccaattgtgaatgttggtgtgaaacaaattaatgaagcttttgaatcatccctattctgtgttttatctagtcacataaatggattaattactaatttcagttgagaccttctaattggtttttactgaaacattgagggaacacaaatttatgggcttcctgatgatgattcttctaggcatcatgtcctatagtttgtcatccctgatgaatgtaaagttacactgttcacaaaggttttgtctcctttccactgctattagtcatggtcactctccccaaaatattatattttttctataaaaagaaaaaaatggaaaaaaattacaaggcaatggaaactattataaggccatttccttttcacattagataaattactataaagactcctaatagcttttcctgttaaggcagacccagtatgaaatggggattattatagcaaccattttggggctatatttacatgctactaaatttttataataattgaaaagattttaacaagtataaaaaattctcataggaattaaatgtagtctccctgtgtcagactgctctttcatagtataactttaaatcttttcttcaacttgagtctttgaagatagttttaattctgcttgtgacattaaaagattatttgggccagttatagcttattaggtgttgaagagaccaaggttgcaaggccaggccctgtgtgaacctttgagctttcatagagagtttcacagcatggactgtgtccccacggtcatccagtgttgtcatgcattggttagtcaaaatggggagggactagggcagtttggatagctcaacaagatacaatctcactctgtggtggtcctgctgacaaatcaagagcattgcttttgtttcttaagaaaacaaactcttttttaaaaattacttttaaatattaactcaaaagttgagattttggggtggtggtgtgccaagacattaattttttttttaaacaatgaagtgaaaaagttttacaatctctaggtttggctagttctcttaacactggttaaattaacattgcataaacacttttcaagtctgatccatatttaataatgctttaaaataaaaataaaaacaatccttttgataaatttaaaatgttacttattttaaaataaatgaagtgagatggcatggtgaggtgaaagtatcactggactaggaagaaggtgacttaggttctagataggtgtcttttaggactctgattttgaggacatcacttactatccatttcttcatgttaaaagaagtcatctcaaactcttagttttttttttttacaactatgtaatttatattccatttacataaggatacacttatttgtcaagctcagcacaatctgtaaatttttaacctatgttacaccatcttcagtgccagtcttgggcaaaattgtgcaagaggtgaagtttatatttgaatatccattctcgttttaggactcttcttccatattagtgtcatcttgcctccctaccttccacatgccccatgacttgatgcagttttaatacttgtaattcccctaaccataagatttactgctgctgtggatatctccatgaagttttcccactgagtcacatcagaaatgccctacatcttatttcctcagggctcaagagaatctgacagataccataaagggatttgacctaatcactaattttcaggtggtggctgatgctttgaacatctctttgctgcccaatccattagcgacagtaggatttttcaaacctggtatgaatagacagaaccctatccagtggaaggagaatttaataaagatagtgctgaaagaattccttaggtaatctataactaggactactcctggtaacagtaatacattccattgttttagtaaccagaaatcttcatgcaatgaaaaatactttaattcatgaagcttactttttttttttggtgtcagagtctcgctcttgtcacccaggctggaatgcagtggcgccatctcagctcactgcaacctccatctcccaggttcaagcgattctcgtgcctcggcctcctgagtagctgggattacaggcgtgtgccactacactcaactaatttttgtatttttaggagagacggggtttcaccctgttggccaggctggtctcgaactcctgacctcaagtgattcacccaccttggcctcataaacctgttttgcagaactcatttattcagcaaatatttattgagtgcctaccagatgccagtcaccgcacaaggcactgggtatatggtatccccaaacaagagacataatcccggtccttaggtagtgctagtgtggtctgtaatatcttactaaggcctttggtatacgacccagagataacacgatgcgtattttagttttgcaaagaaggggtttggtctctgtgccagctctataattgttttgctacgattccactgaaactcttcgatcaagctactttatgtaaatcacttcattgttttaaaggaataaacttgattatattgtttttttatttggcataactgtgattcttttaggacaattactgtacacattaaggtgtatgtcagatattcatattgacccaaatgtgtaatattccagttttctctgcataagtaattaaaatatacttaaaaattaatagttttatctgggtacaaataaacaggtgcctgaactagttcacagacaaggaaacttctatgtaaaaatcactatgatttctgaattgctatgtgaaactacagatctttggaacactgtttaggtagggtgttaagacttacacagtacctcgtttctacacagagaaagaaatggccatacttcaggaactgcagtgcttatgaggggatatttaggcctcttgaatttttgatgtagatgggcatttttttaaggtagtggttaattacctttatgtgaactttgaatggtttaacaaaagatttgtttttgtagagattttaaagggggagaattctagaaataaatgttacctaattattacagccttaaagacaaaaatccttgttgaagtttttttaaaaaaagctaaattacatagacttaggcattaacatgtttgtggaagaatatagcagacgtatattgtatcatttgagtgaatgttcccaagtaggcattctaggctctatttaactgagtcacactgcataggaatttagaacctaacttttataggttatcaaaactgttgtcaccattgcacaattttgtcctaatatatacatagaaactttgtggggcatgttaagttacagtttgcacaagttcatctcatttgtattccattgattttttttttcttctaaacattttttcttcaaacagtatataactttttttaggggatttttttttagacagcaaaaactatctgaagatttccatttgtcaaaaagtaatgatttcttgataattgtgtagtaatgttttttagaacccagcagttaccttaaagctgaatttatatttagtaacttctgtgttaatactggatagcatgaattctgcattgagaaactgaatagctgtcataaaatgaaactttctttctaaagaaagatactcacatgagttcttgaagaatagtcataactagattaagatctgtgttttagtttaatagtttgaagtgcctgtttgggataatgataggtaatttagatgaatttaggggaaaaaaaagttatctgcagatatgttgagggcccatctctccccccacacccccacagagctaactgggttacagtgttttatccgaaagtttccaattccactgtcttgtgttttcatgttgaaaatacttttgcatttttcctttgagtgccaatttcttactagtactatttcttaatgtaacatgtttacctggaatgtattttaactatttttgtatagtgtaaactgaaacatgcacattttgtacattgtgctttcttttgtgggacatatgcagtgtgatccagttgttttccatcatttggttgcgctgacctaggaatgttggtcatatcaaacattaaaaatgaccactcttttaattgaaattaacttttaaatgtttataggagtatgtgctgtgaagtgatctaaaatttgtaatatttttgtcatgaactgtactactcctaattattgtaatgtaataaaaatagttacagtgacaaaaaaaaaaaaaaa

SEQ ID NO: 32 - protein, 189 aa, Artificial sequence; identical to SEQ ID NO: 30
  Synthetic Construct

SEQ ID NO: 33 - DNA, 5436 bp, Artificial sequence
  /note="Description of Artificial Sequence: mutated Homo sapiens v-Ki-ras2 Kirsten rat sarcoma viral oncogene homolog (KRAS), transcript variant a, mutation KRAS_ Q61K"
  CDS (182)..(751)
ggccgcggcggcggaggcagcagcggcggcggcagtggcggcggcgaaggtggcggcggctcggccagtactcccggcccccgccatttcggactgggagcgagcgcggcgcaggcactgaaggcggcggcggggccagaggctcagcggctcccaggtgcgggagagaggcctgctgaaaatgactgaatataaacttgtggtagttggagctggtggcgtaggcaagagtgccttgacgatacagctaattcagaatcattttgtggacgaatatgatccaacaatagaggattcctacaggaagcaagtagtaattgatggagaaacctgtctcttggatattctcgacacagcaggtaaagaggagtacagtgcaatgagggaccagtacatgaggactggggagggctttctttgtgtatttgccataaataatactaaatcatttgaagatattcaccattatagagaacaaattaaaagagttaaggactctgaagatgtacctatggtcctagtaggaaataaatgtgatttgccttctagaacagtagacacaaaacaggctcaggacttagcaagaagttatggaattccttttattgaaacatcagcaaagacaagacagagagtggaggatgctttttatacattggtgagggagatccgacaatacagattgaaaaaaatcagcaaagaagaaaagactcctggctgtgtgaaaattaaaaaatgcattataatgtaatctgggtgttgatgatgccttctatacattagttcgagaaattcgaaaacataaagaaaagatgagcaaagatggtaaaaagaagaaaaagaagtcaaagacaaagtgtgtaattatgtaaatacaatttgtacttttttcttaaggcatactagtacaagtggtaatttttgtacattacactaaattattagcatttgttttagcattacctaatttttttcctgctccatgcagactgttagcttttaccttaaatgcttattttaaaatgacagtggaagtttttttttcctctaagtgccagtattcccagagttttggtttttgaactagcaatgcctgtgaaaaagaaactgaatacctaagatttctgtcttggggtttttggtgcatgcagttgattacttcttatttttcttaccaattgtgaatgttggtgtgaaacaaattaatgaagcttttgaatcatccctattctgtgttttatctagtcacataaatggattaattactaatttcagttgagaccttctaattggtttttactgaaacattgagggaacacaaatttatgggcttcctgatgatgattcttctaggcatcatgtcctatagtttgtcatccctgatgaatgtaaagttacactgttcacaaaggttttgtctcctttccactgctattagtcatggtcactctccccaaaatattatattttttctataaaaagaaaaaaatggaaaaaaattacaaggcaatggaaactattataaggccatttccttttcacattagataaattactataaagactcctaatagcttttcctgttaaggcagacccagtatgaaatggggattattatagcaaccattttggggctatatttacatgctactaaatttttataataattgaaaagattttaacaagtataaaaaattctcataggaattaaatgtagtctccctgtgtcagactgctctttcatagtataactttaaatcttttcttcaacttgagtctttgaagatagttttaattctgcttgtgacattaaaagattatttgggccagttatagcttattaggtgttgaagagaccaaggttgcaaggccaggccctgtgtgaacctttgagctttcatagagagtttcacagcatggactgtgtccccacggtcatccagtgttgtcatgcattggttagtcaaaatggggagggactagggcagtttggatagctcaacaagatacaatctcactctgtggtggtcctgctgacaaatcaagagcattgcttttgtttcttaagaaaacaaactcttttttaaaaattacttttaaatattaactcaaaagttgagattttggggtggtggtgtgccaagacattaattttttttttaaacaatgaagtgaaaaagttttacaatctctaggtttggctagttctcttaacactggttaaattaacattgcataaacacttttcaagtctgatccatatttaataatgctttaaaataaaaataaaaacaatccttttgataaatttaaaatgttacttattttaaaataaatgaagtgagatggcatggtgaggtgaaagtatcactggactaggaagaaggtgacttaggttctagataggtgtcttttaggactctgattttgaggacatcacttactatccatttcttcatgttaaaagaagtcatctcaaactcttagttttttttttttacaactatgtaatttatattccatttacataaggatacacttatttgtcaagctcagcacaatctgtaaatttttaacctatgttacaccatcttcagtgccagtcttgggcaaaattgtgcaagaggtgaagtttatatttgaatatccattctcgttttaggactcttcttccatattagtgtcatcttgcctccctaccttccacatgccccatgacttgatgcagttttaatacttgtaattcccctaaccataagatttactgctgctgtggatatctccatgaagttttcccactgagtcacatcagaaatgccctacatcttatttcctcagggctcaagagaatctgacagataccataaagggatttgacctaatcactaattttcaggtggtggctgatgctttgaacatctctttgctgcccaatccattagcgacagtaggatttttcaaacctggtatgaatagacagaaccctatccagtggaaggagaatttaataaagatagtgctgaaagaattccttaggtaatctataactaggactactcctggtaacagtaatacattccattgttttagtaaccagaaatcttcatgcaatgaaaaatactttaattcatgaagcttactttttttttttggtgtcagagtctcgctcttgtcacccaggctggaatgcagtggcgccatctcagctcactgcaacctccatctcccaggttcaagcgattctcgtgcctcggcctcctgagtagctgggattacaggcgtgtgccactacactcaactaatttttgtatttttaggagagacggggtttcaccctgttggccaggctggtctcgaactcctgacctcaagtgattcacccaccttggcctcataaacctgttttgcagaactcatttattcagcaaatatttattgagtgcctaccagatgccagtcaccgcacaaggcactgggtatatggtatccccaaacaagagacataatcccggtccttaggtagtgctagtgtggtctgtaatatcttactaaggcctttggtatacgacccagagataacacgatgcgtattttagttttgcaaagaaggggtttggtctctgtgccagctctataattgttttgctacgattccactgaaactcttcgatcaagctactttatgtaaatcacttcattgttttaaaggaataaacttgattatattgtttttttatttggcataactgtgattcttttaggacaattactgtacacattaaggtgtatgtcagatattcatattgacccaaatgtgtaatattccagttttctctgcataagtaattaaaatatacttaaaaattaatagttttatctgggtacaaataaacaggtgcctgaactagttcacagacaaggaaacttctatgtaaaaatcactatgatttctgaattgctatgtgaaactacagatctttggaacactgtttaggtagggtgttaagacttacacagtacctcgtttctacacagagaaagaaatggccatacttcaggaactgcagtgcttatgaggggatatttaggcctcttgaatttttgatgtagatgggcatttttttaaggtagtggttaattacctttatgtgaactttgaatggtttaacaaaagatttgtttttgtagagattttaaagggggagaattctagaaataaatgttacctaattattacagccttaaagacaaaaatccttgttgaagtttttttaaaaaaagctaaattacatagacttaggcattaacatgtttgtggaagaatatagcagacgtatattgtatcatttgagtgaatgttcccaagtaggcattctaggctctatttaactgagtcacactgcataggaatttagaacctaacttttataggttatcaaaactgttgtcaccattgcacaattttgtcctaatatatacatagaaactttgtggggcatgttaagttacagtttgcacaagttcatctcatttgtattccattgattttttttttcttctaaacattttttcttcaaacagtatataactttttttaggggatttttttttagacagcaaaaactatctgaagatttccatttgtcaaaaagtaatgatttcttgataattgtgtagtaatgttttttagaacccagcagttaccttaaagctgaatttatatttagtaacttctgtgttaatactggatagcatgaattctgcattgagaaactgaatagctgtcataaaatgaaactttctttctaaagaaagatactcacatgagttcttgaagaatagtcataactagattaagatctgtgttttagtttaatagtttgaagtgcctgtttgggataatgataggtaatttagatgaatttaggggaaaaaaaagttatctgcagatatgttgagggcccatctctccccccacacccccacagagctaactgggttacagtgttttatccgaaagtttccaattccactgtcttgtgttttcatgttgaaaatacttttgcatttttcctttgagtgccaatttcttactagtactatttcttaatgtaacatgtttacctggaatgtattttaactatttttgtatagtgtaaactgaaacatgcacattttgtacattgtgctttcttttgtgggacatatgcagtgtgatccagttgttttccatcatttggttgcgctgacctaggaatgttggtcatatcaaacattaaaaatgaccactcttttaattgaaattaacttttaaatgtttataggagtatgtgctgtgaagtgatctaaaatttgtaatatttttgtcatgaactgtactactcctaattattgtaatgtaataaaaatagttacagtgacaaaaaaaaaaaaaaa

SEQ ID NO: 34 - protein, 189 aa, Artificial sequence
  Synthetic Construct
MTEYKLVVVGAGGVGKSALTIQLIQNHFVDEYDPTIEDSYRKQVVIDGETCLLDILDTAGKEEYSAMRDQYMRTGEGFLCVFAINNTKSFEDIHHYREQIKRVKDSEDVPMVLVGNKCDLPSRTVDTKQAQDLARSYGIPFIETSAKTRQRVEDAFYTLVREIRQYRLKKISKEEKTPGCVKIKKCIIM

SEQ ID NO: 35 - DNA, 5436 bp, Artificial sequence
  /note="Description of Artificial Sequence: mutated Homo sapiens v-Ki-ras2 Kirsten rat sarcoma viral oncogene homolog (KRAS), transcript variant a, mutation KRAS_ Q61L"
  CDS (182)..(751)
ggccgcggcggcggaggcagcagcggcggcggcagtggcggcggcgaaggtggcggcggctcggccagtactcccggcccccgccatttcggactgggagcgagcgcggcgcaggcactgaaggcggcggcggggccagaggctcagcggctcccaggtgcgggagagaggcctgctgaaaatgactgaatataaacttgtggtagttggagctggtggcgtaggcaagagtgccttgacgatacagctaattcagaatcattttgtggacgaatatgatccaacaatagaggattcctacaggaagcaagtagtaattgatggagaaacctgtctcttggatattctcgacacagcaggtctagaggagtacagtgcaatgagggaccagtacatgaggactggggagggctttctttgtgtatttgccataaataatactaaatcatttgaagatattcaccattatagagaacaaattaaaagagttaaggactctgaagatgtacctatggtcctagtaggaaataaatgtgatttgccttctagaacagtagacacaaaacaggctcaggacttagcaagaagttatggaattccttttattgaaacatcagcaaagacaagacagagagtggaggatgctttttatacattggtgagggagatccgacaatacagattgaaaaaaatcagcaaagaagaaaagactcctggctgtgtgaaaattaaaaaatgcattataatgtaatctgggtgttgatgatgccttctatacattagttcgagaaattcgaaaacataaagaaaagatgagcaaagatggtaaaaagaagaaaaagaagtcaaagacaaagtgtgtaattatgtaaatacaatttgtacttttttcttaaggcatactagtacaagtggtaatttttgtacattacactaaattattagcatttgttttagcattacctaatttttttcctgctccatgcagactgttagcttttaccttaaatgcttattttaaaatgacagtggaagtttttttttcctctaagtgccagtattcccagagttttggtttttgaactagcaatgcctgtgaaaaagaaactgaatacctaagatttctgtcttggggtttttggtgcatgcagttgattacttcttatttttcttaccaattgtgaatgttggtgtgaaacaaattaatgaagcttttgaatcatccctattctgtgttttatctagtcacataaatggattaattactaatttcagttgagaccttctaattggtttttactgaaacattgagggaacacaaatttatgggcttcctgatgatgattcttctaggcatcatgtcctatagtttgtcatccctgatgaatgtaaagttacactgttcacaaaggttttgtctcctttccactgctattagtcatggtcactctccccaaaatattatattttttctataaaaagaaaaaaatggaaaaaaattacaaggcaatggaaactattataaggccatttccttttcacattagataaattactataaagactcctaatagcttttcctgttaaggcagacccagtatgaaatggggattattatagcaaccattttggggctatatttacatgctactaaatttttataataattgaaaagattttaacaagtataaaaaattctcataggaattaaatgtagtctccctgtgtcagactgctctttcatagtataactttaaatcttttcttcaacttgagtctttgaagatagttttaattctgcttgtgacattaaaagattatttgggccagttatagcttattaggtgttgaagagaccaaggttgcaaggccaggccctgtgtgaacctttgagctttcatagagagtttcacagcatggactgtgtccccacggtcatccagtgttgtcatgcattggttagtcaaaatggggagggactagggcagtttggatagctcaacaagatacaatctcactctgtggtggtcctgctgacaaatcaagagcattgcttttgtttcttaagaaaacaaactcttttttaaaaattacttttaaatattaactcaaaagttgagattttggggtggtggtgtgccaagacattaattttttttttaaacaatgaagtgaaaaagttttacaatctctaggtttggctagttctcttaacactggttaaattaacattgcataaacacttttcaagtctgatccatatttaataatgctttaaaataaaaataaaaacaatccttttgataaatttaaaatgttacttattttaaaataaatgaagtgagatggcatggtgaggtgaaagtatcactggactaggaagaaggtgacttaggttctagataggtgtcttttaggactctgattttgaggacatcacttactatccatttcttcatgttaaaagaagtcatctcaaactcttagttttttttttttacaactatgtaatttatattccatttacataaggatacacttatttgtcaagctcagcacaatctgtaaatttttaacctatgttacaccatcttcagtgccagtcttgggcaaaattgtgcaagaggtgaagtttatatttgaatatccattctcgttttaggactcttcttccatattagtgtcatcttgcctccctaccttccacatgccccatgacttgatgcagttttaatacttgtaattcccctaaccataagatttactgctgctgtggatatctccatgaagttttcccactgagtcacatcagaaatgccctacatcttatttcctcagggctcaagagaatctgacagataccataaagggatttgacctaatcactaattttcaggtggtggctgatgctttgaacatctctttgctgcccaatccattagcgacagtaggatttttcaaacctggtatgaatagacagaaccctatccagtggaaggagaatttaataaagatagtgctgaaagaattccttaggtaatctataactaggactactcctggtaacagtaatacattccattgttttagtaaccagaaatcttcatgcaatgaaaaatactttaattcatgaagcttactttttttttttggtgtcagagtctcgctcttgtcacccaggctggaatgcagtggcgccatctcagctcactgcaacctccatctcccaggttcaagcgattctcgtgcctcggcctcctgagtagctgggattacaggcgtgtgccactacactcaactaatttttgtatttttaggagagacggggtttcaccctgttggccaggctggtctcgaactcctgacctcaagtgattcacccaccttggcctcataaacctgttttgcagaactcatttattcagcaaatatttattgagtgcctaccagatgccagtcaccgcacaaggcactgggtatatggtatccccaaacaagagacataatcccggtccttaggtagtgctagtgtggtctgtaatatcttactaaggcctttggtatacgacccagagataacacgatgcgtattttagttttgcaaagaaggggtttggtctctgtgccagctctataattgttttgctacgattccactgaaactcttcgatcaagctactttatgtaaatcacttcattgttttaaaggaataaacttgattatattgtttttttatttggcataactgtgattcttttaggacaattactgtacacattaaggtgtatgtcagatattcatattgacccaaatgtgtaatattccagttttctctgcataagtaattaaaatatacttaaaaattaatagttttatctgggtacaaataaacaggtgcctgaactagttcacagacaaggaaacttctatgtaaaaatcactatgatttctgaattgctatgtgaaactacagatctttggaacactgtttaggtagggtgttaagacttacacagtacctcgtttctacacagagaaagaaatggccatacttcaggaactgcagtgcttatgaggggatatttaggcctcttgaatttttgatgtagatgggcatttttttaaggtagtggttaattacctttatgtgaactttgaatggtttaacaaaagatttgtttttgtagagattttaaagggggagaattctagaaataaatgttacctaattattacagccttaaagacaaaaatccttgttgaagtttttttaaaaaaagctaaattacatagacttaggcattaacatgtttgtggaagaatatagcagacgtatattgtatcatttgagtgaatgttcccaagtaggcattctaggctctatttaactgagtcacactgcataggaatttagaacctaacttttataggttatcaaaactgttgtcaccattgcacaattttgtcctaatatatacatagaaactttgtggggcatgttaagttacagtttgcacaagttcatctcatttgtattccattgattttttttttcttctaaacattttttcttcaaacagtatataactttttttaggggatttttttttagacagcaaaaactatctgaagatttccatttgtcaaaaagtaatgatttcttgataattgtgtagtaatgttttttagaacccagcagttaccttaaagctgaatttatatttagtaacttctgtgttaatactggatagcatgaattctgcattgagaaactgaatagctgtcataaaatgaaactttctttctaaagaaagatactcacatgagttcttgaagaatagtcataactagattaagatctgtgttttagtttaatagtttgaagtgcctgtttgggataatgataggtaatttagatgaatttaggggaaaaaaaagttatctgcagatatgttgagggcccatctctccccccacacccccacagagctaactgggttacagtgttttatccgaaagtttccaattccactgtcttgtgttttcatgttgaaaatacttttgcatttttcctttgagtgccaatttcttactagtactatttcttaatgtaacatgtttacctggaatgtattttaactatttttgtatagtgtaaactgaaacatgcacattttgtacattgtgctttcttttgtgggacatatgcagtgtgatccagttgttttccatcatttggttgcgctgacctaggaatgttggtcatatcaaacattaaaaatgaccactcttttaattgaaattaacttttaaatgtttataggagtatgtgctgtgaagtgatctaaaatttgtaatatttttgtcatgaactgtactactcctaattattgtaatgtaataaaaatagttacagtgacaaaaaaaaaaaaaaa

SEQ ID NO: 36 - protein, 189 aa, Artificial sequence
  Synthetic Construct
MTEYKLVVVGAGGVGKSALTIQLIQNHFVDEYDPTIEDSYRKQVVIDGETCLLDILDTAGLEEYSAMRDQYMRTGEGFLCVFAINNTKSFEDIHHYREQIKRVKDSEDVPMVLVGNKCDLPSRTVDTKQAQDLARSYGIPFIETSAKTRQRVEDAFYTLVREIRQYRLKKISKEEKTPGCVKIKKCIIM

SEQ ID NO: 37 - DNA, 5436 bp, Artificial sequence
  /note="Description of Artificial Sequence: mutated Homo sapiens v-Ki-ras2 Kirsten rat sarcoma viral oncogene homolog (KRAS), transcript variant a, mutation KRAS_ Q61R"
  CDS (182)..(751)
ggccgcggcggcggaggcagcagcggcggcggcagtggcggcggcgaaggtggcggcggctcggccagtactcccggcccccgccatttcggactgggagcgagcgcggcgcaggcactgaaggcggcggcggggccagaggctcagcggctcccaggtgcgggagagaggcctgctgaaaatgactgaatataaacttgtggtagttggagctggtggcgtaggcaagagtgccttgacgatacagctaattcagaatcattttgtggacgaatatgatccaacaatagaggattcctacaggaagcaagtagtaattgatggagaaacctgtctcttggatattctcgacacagcaggtcgagaggagtacagtgcaatgagggaccagtacatgaggactggggagggctttctttgtgtatttgccataaataatactaaatcatttgaagatattcaccattatagagaacaaattaaaagagttaaggactctgaagatgtacctatggtcctagtaggaaataaatgtgatttgccttctagaacagtagacacaaaacaggctcaggacttagcaagaagttatggaattccttttattgaaacatcagcaaagacaagacagagagtggaggatgctttttatacattggtgagggagatccgacaatacagattgaaaaaaatcagcaaagaagaaaagactcctggctgtgtgaaaattaaaaaatgcattataatgtaatctgggtgttgatgatgccttctatacattagttcgagaaattcgaaaacataaagaaaagatgagcaaagatggtaaaaagaagaaaaagaagtcaaagacaaagtgtgtaattatgtaaatacaatttgtacttttttcttaaggcatactagtacaagtggtaatttttgtacattacactaaattattagcatttgttttagcattacctaatttttttcctgctccatgcagactgttagcttttaccttaaatgcttattttaaaatgacagtggaagtttttttttcctctaagtgccagtattcccagagttttggtttttgaactagcaatgcctgtgaaaaagaaactgaatacctaagatttctgtcttggggtttttggtgcatgcagttgattacttcttatttttcttaccaattgtgaatgttggtgtgaaacaaattaatgaagcttttgaatcatccctattctgtgttttatctagtcacataaatggattaattactaatttcagttgagaccttctaattggtttttactgaaacattgagggaacacaaatttatgggcttcctgatgatgattcttctaggcatcatgtcctatagtttgtcatccctgatgaatgtaaagttacactgttcacaaaggttttgtctcctttccactgctattagtcatggtcactctccccaaaatattatattttttctataaaaagaaaaaaatggaaaaaaattacaaggcaatggaaactattataaggccatttccttttcacattagataaattactataaagactcctaatagcttttcctgttaaggcagacccagtatgaaatggggattattatagcaaccattttggggctatatttacatgctactaaatttttataataattgaaaagattttaacaagtataaaaaattctcataggaattaaatgtagtctccctgtgtcagactgctctttcatagtataactttaaatcttttcttcaacttgagtctttgaagatagttttaattctgcttgtgacattaaaagattatttgggccagttatagcttattaggtgttgaagagaccaaggttgcaaggccaggccctgtgtgaacctttgagctttcatagagagtttcacagcatggactgtgtccccacggtcatccagtgttgtcatgcattggttagtcaaaatggggagggactagggcagtttggatagctcaacaagatacaatctcactctgtggtggtcctgctgacaaatcaagagcattgcttttgtttcttaagaaaacaaactcttttttaaaaattacttttaaatattaactcaaaagttgagattttggggtggtggtgtgccaagacattaattttttttttaaacaatgaagtgaaaaagttttacaatctctaggtttggctagttctcttaacactggttaaattaacattgcataaacacttttcaagtctgatccatatttaataatgctttaaaataaaaataaaaacaatccttttgataaatttaaaatgttacttattttaaaataaatgaagtgagatggcatggtgaggtgaaagtatcactggactaggaagaaggtgacttaggttctagataggtgtcttttaggactctgattttgaggacatcacttactatccatttcttcatgttaaaagaagtcatctcaaactcttagttttttttttttacaactatgtaatttatattccatttacataaggatacacttatttgtcaagctcagcacaatctgtaaatttttaacctatgttacaccatcttcagtgccagtcttgggcaaaattgtgcaagaggtgaagtttatatttgaatatccattctcgttttaggactcttcttccatattagtgtcatcttgcctccctaccttccacatgccccatgacttgatgcagttttaatacttgtaattcccctaaccataagatttactgctgctgtggatatctccatgaagttttcccactgagtcacatcagaaatgccctacatcttatttcctcagggctcaagagaatctgacagataccataaagggatttgacctaatcactaattttcaggtggtggctgatgctttgaacatctctttgctgcccaatccattagcgacagtaggatttttcaaacctggtatgaatagacagaaccctatccagtggaaggagaatttaataaagatagtgctgaaagaattccttaggtaatctataactaggactactcctggtaacagtaatacattccattgttttagtaaccagaaatcttcatgcaatgaaaaatactttaattcatgaagcttactttttttttttggtgtcagagtctcgctcttgtcacccaggctggaatgcagtggcgccatctcagctcactgcaacctccatctcccaggttcaagcgattctcgtgcctcggcctcctgagtagctgggattacaggcgtgtgccactacactcaactaatttttgtatttttaggagagacggggtttcaccctgttggccaggctggtctcgaactcctgacctcaagtgattcacccaccttggcctcataaacctgttttgcagaactcatttattcagcaaatatttattgagtgcctaccagatgccagtcaccgcacaaggcactgggtatatggtatccccaaacaagagacataatcccggtccttaggtagtgctagtgtggtctgtaatatcttactaaggcctttggtatacgacccagagataacacgatgcgtattttagttttgcaaagaaggggtttggtctctgtgccagctctataattgttttgctacgattccactgaaactcttcgatcaagctactttatgtaaatcacttcattgttttaaaggaataaacttgattatattgtttttttatttggcataactgtgattcttttaggacaattactgtacacattaaggtgtatgtcagatattcatattgacccaaatgtgtaatattccagttttctctgcataagtaattaaaatatacttaaaaattaatagttttatctgggtacaaataaacaggtgcctgaactagttcacagacaaggaaacttctatgtaaaaatcactatgatttctgaattgctatgtgaaactacagatctttggaacactgtttaggtagggtgttaagacttacacagtacctcgtttctacacagagaaagaaatggccatacttcaggaactgcagtgcttatgaggggatatttaggcctcttgaatttttgatgtagatgggcatttttttaaggtagtggttaattacctttatgtgaactttgaatggtttaacaaaagatttgtttttgtagagattttaaagggggagaattctagaaataaatgttacctaattattacagccttaaagacaaaaatccttgttgaagtttttttaaaaaaagctaaattacatagacttaggcattaacatgtttgtggaagaatatagcagacgtatattgtatcatttgagtgaatgttcccaagtaggcattctaggctctatttaactgagtcacactgcataggaatttagaacctaacttttataggttatcaaaactgttgtcaccattgcacaattttgtcctaatatatacatagaaactttgtggggcatgttaagttacagtttgcacaagttcatctcatttgtattccattgattttttttttcttctaaacattttttcttcaaacagtatataactttttttaggggatttttttttagacagcaaaaactatctgaagatttccatttgtcaaaaagtaatgatttcttgataattgtgtagtaatgttttttagaacccagcagttaccttaaagctgaatttatatttagtaacttctgtgttaatactggatagcatgaattctgcattgagaaactgaatagctgtcataaaatgaaactttctttctaaagaaagatactcacatgagttcttgaagaatagtcataactagattaagatctgtgttttagtttaatagtttgaagtgcctgtttgggataatgataggtaatttagatgaatttaggggaaaaaaaagttatctgcagatatgttgagggcccatctctccccccacacccccacagagctaactgggttacagtgttttatccgaaagtttccaattccactgtcttgtgttttcatgttgaaaatacttttgcatttttcctttgagtgccaatttcttactagtactatttcttaatgtaacatgtttacctggaatgtattttaactatttttgtatagtgtaaactgaaacatgcacattttgtacattgtgctttcttttgtgggacatatgcagtgtgatccagttgttttccatcatttggttgcgctgacctaggaatgttggtcatatcaaacattaaaaatgaccactcttttaattgaaattaacttttaaatgtttataggagtatgtgctgtgaagtgatctaaaatttgtaatatttttgtcatgaactgtactactcctaattattgtaatgtaataaaaatagttacagtgacaaaaaaaaaaaaaaa

SEQ ID NO: 38 - protein, 189 aa, Artificial sequence
  Synthetic Construct
MTEYKLVVVGAGGVGKSALTIQLIQNHFVDEYDPTIEDSYRKQVVIDGETCLLDILDTAGREEYSAMRDQYMRTGEGFLCVFAINNTKSFEDIHHYREQIKRVKDSEDVPMVLVGNKCDLPSRTVDTKQAQDLARSYGIPFIETSAKTRQRVEDAFYTLVREIRQYRLKKISKEEKTPGCVKIKKCIIM

SEQ ID NO: 39 - DNA, 5436 bp, Artificial sequence
  /note="Description of Artificial Sequence: mutated Homo sapiens v-Ki-ras2 Kirsten rat sarcoma viral oncogene homolog (KRAS), transcript variant a, mutation KRAS_ Q61P"
  CDS (182)..(751)
ggccgcggcggcggaggcagcagcggcggcggcagtggcggcggcgaaggtggcggcggctcggccagtactcccggcccccgccatttcggactgggagcgagcgcggcgcaggcactgaaggcggcggcggggccagaggctcagcggctcccaggtgcgggagagaggcctgctgaaaatgactgaatataaacttgtggtagttggagctggtggcgtaggcaagagtgccttgacgatacagctaattcagaatcattttgtggacgaatatgatccaacaatagaggattcctacaggaagcaagtagtaattgatggagaaacctgtctcttggatattctcgacacagcaggtccagaggagtacagtgcaatgagggaccagtacatgaggactggggagggctttctttgtgtatttgccataaataatactaaatcatttgaagatattcaccattatagagaacaaattaaaagagttaaggactctgaagatgtacctatggtcctagtaggaaataaatgtgatttgccttctagaacagtagacacaaaacaggctcaggacttagcaagaagttatggaattccttttattgaaacatcagcaaagacaagacagagagtggaggatgctttttatacattggtgagggagatccgacaatacagattgaaaaaaatcagcaaagaagaaaagactcctggctgtgtgaaaattaaaaaatgcattataatgtaatctgggtgttgatgatgccttctatacattagttcgagaaattcgaaaacataaagaaaagatgagcaaagatggtaaaaagaagaaaaagaagtcaaagacaaagtgtgtaattatgtaaatacaatttgtacttttttcttaaggcatactagtacaagtggtaatttttgtacattacactaaattattagcatttgttttagcattacctaatttttttcctgctccatgcagactgttagcttttaccttaaatgcttattttaaaatgacagtggaagtttttttttcctctaagtgccagtattcccagagttttggtttttgaactagcaatgcctgtgaaaaagaaactgaatacctaagatttctgtcttggggtttttggtgcatgcagttgattacttcttatttttcttaccaattgtgaatgttggtgtgaaacaaattaatgaagcttttgaatcatccctattctgtgttttatctagtcacataaatggattaattactaatttcagttgagaccttctaattggtttttactgaaacattgagggaacacaaatttatgggcttcctgatgatgattcttctaggcatcatgtcctatagtttgtcatccctgatgaatgtaaagttacactgttcacaaaggttttgtctcctttccactgctattagtcatggtcactctccccaaaatattatattttttctataaaaagaaaaaaatggaaaaaaattacaaggcaatggaaactattataaggccatttccttttcacattagataaattactataaagactcctaatagcttttcctgttaaggcagacccagtatgaaatggggattattatagcaaccattttggggctatatttacatgctactaaatttttataataattgaaaagattttaacaagtataaaaaattctcataggaattaaatgtagtctccctgtgtcagactgctctttcatagtataactttaaatcttttcttcaacttgagtctttgaagatagttttaattctgcttgtgacattaaaagattatttgggccagttatagcttattaggtgttgaagagaccaaggttgcaaggccaggccctgtgtgaacctttgagctttcatagagagtttcacagcatggactgtgtccccacggtcatccagtgttgtcatgcattggttagtcaaaatggggagggactagggcagtttggatagctcaacaagatacaatctcactctgtggtggtcctgctgacaaatcaagagcattgcttttgtttcttaagaaaacaaactcttttttaaaaattacttttaaatattaactcaaaagttgagattttggggtggtggtgtgccaagacattaattttttttttaaacaatgaagtgaaaaagttttacaatctctaggtttggctagttctcttaacactggttaaattaacattgcataaacacttttcaagtctgatccatatttaataatgctttaaaataaaaataaaaacaatccttttgataaatttaaaatgttacttattttaaaataaatgaagtgagatggcatggtgaggtgaaagtatcactggactaggaagaaggtgacttaggttctagataggtgtcttttaggactctgattttgaggacatcacttactatccatttcttcatgttaaaagaagtcatctcaaactcttagttttttttttttacaactatgtaatttatattccatttacataaggatacacttatttgtcaagctcagcacaatctgtaaatttttaacctatgttacaccatcttcagtgccagtcttgggcaaaattgtgcaagaggtgaagtttatatttgaatatccattctcgttttaggactcttcttccatattagtgtcatcttgcctccctaccttccacatgccccatgacttgatgcagttttaatacttgtaattcccctaaccataagatttactgctgctgtggatatctccatgaagttttcccactgagtcacatcagaaatgccctacatcttatttcctcagggctcaagagaatctgacagataccataaagggatttgacctaatcactaattttcaggtggtggctgatgctttgaacatctctttgctgcccaatccattagcgacagtaggatttttcaaacctggtatgaatagacagaaccctatccagtggaaggagaatttaataaagatagtgctgaaagaattccttaggtaatctataactaggactactcctggtaacagtaatacattccattgttttagtaaccagaaatcttcatgcaatgaaaaatactttaattcatgaagcttactttttttttttggtgtcagagtctcgctcttgtcacccaggctggaatgcagtggcgccatctcagctcactgcaacctccatctcccaggttcaagcgattctcgtgcctcggcctcctgagtagctgggattacaggcgtgtgccactacactcaactaatttttgtatttttaggagagacggggtttcaccctgttggccaggctggtctcgaactcctgacctcaagtgattcacccaccttggcctcataaacctgttttgcagaactcatttattcagcaaatatttattgagtgcctaccagatgccagtcaccgcacaaggcactgggtatatggtatccccaaacaagagacataatcccggtccttaggtagtgctagtgtggtctgtaatatcttactaaggcctttggtatacgacccagagataacacgatgcgtattttagttttgcaaagaaggggtttggtctctgtgccagctctataattgttttgctacgattccactgaaactcttcgatcaagctactttatgtaaatcacttcattgttttaaaggaataaacttgattatattgtttttttatttggcataactgtgattcttttaggacaattactgtacacattaaggtgtatgtcagatattcatattgacccaaatgtgtaatattccagttttctctgcataagtaattaaaatatacttaaaaattaatagttttatctgggtacaaataaacaggtgcctgaactagttcacagacaaggaaacttctatgtaaaaatcactatgatttctgaattgctatgtgaaactacagatctttggaacactgtttaggtagggtgttaagacttacacagtacctcgtttctacacagagaaagaaatggccatacttcaggaactgcagtgcttatgaggggatatttaggcctcttgaatttttgatgtagatgggcatttttttaaggtagtggttaattacctttatgtgaactttgaatggtttaacaaaagatttgtttttgtagagattttaaagggggagaattctagaaataaatgttacctaattattacagccttaaagacaaaaatccttgttgaagtttttttaaaaaaagctaaattacatagacttaggcattaacatgtttgtggaagaatatagcagacgtatattgtatcatttgagtgaatgttcccaagtaggcattctaggctctatttaactgagtcacactgcataggaatttagaacctaacttttataggttatcaaaactgttgtcaccattgcacaattttgtcctaatatatacatagaaactttgtggggcatgttaagttacagtttgcacaagttcatctcatttgtattccattgattttttttttcttctaaacattttttcttcaaacagtatataactttttttaggggatttttttttagacagcaaaaactatctgaagatttccatttgtcaaaaagtaatgatttcttgataattgtgtagtaatgttttttagaacccagcagttaccttaaagctgaatttatatttagtaacttctgtgttaatactggatagcatgaattctgcattgagaaactgaatagctgtcataaaatgaaactttctttctaaagaaagatactcacatgagttcttgaagaatagtcataactagattaagatctgtgttttagtttaatagtttgaagtgcctgtttgggataatgataggtaatttagatgaatttaggggaaaaaaaagttatctgcagatatgttgagggcccatctctccccccacacccccacagagctaactgggttacagtgttttatccgaaagtttccaattccactgtcttgtgttttcatgttgaaaatacttttgcatttttcctttgagtgccaatttcttactagtactatttcttaatgtaacatgtttacctggaatgtattttaactatttttgtatagtgtaaactgaaacatgcacattttgtacattgtgctttcttttgtgggacatatgcagtgtgatccagttgttttccatcatttggttgcgctgacctaggaatgttggtcatatcaaacattaaaaatgaccactcttttaattgaaattaacttttaaatgtttataggagtatgtgctgtgaagtgatctaaaatttgtaatatttttgtcatgaactgtactactcctaattattgtaatgtaataaaaatagttacagtgacaaaaaaaaaaaaaaa

SEQ ID NO: 40 - protein, 189 aa, Artificial sequence
  Synthetic Construct
MTEYKLVVVGAGGVGKSALTIQLIQNHFVDEYDPTIEDSYRKQVVIDGETCLLDILDTAGPEEYSAMRDQYMRTGEGFLCVFAINNTKSFEDIHHYREQIKRVKDSEDVPMVLVGNKCDLPSRTVDTKQAQDLARSYGIPFIETSAKTRQRVEDAFYTLVREIRQYRLKKISKEEKTPGCVKIKKCIIM

SEQ ID NO: 41 - DNA, 5312 bp, Artificial sequence
  /note="Description of Artificial Sequence: mutated Homo sapiens v-Ki-ras2 Kirsten rat sarcoma viral oncogene homolog (KRAS), transcript variant b, mutation KRAS_ G12V"
  CDS (182)..(748)
ggccgcggcggcggaggcagcagcggcggcggcagtggcggcggcgaaggtggcggcggctcggccagtactcccggcccccgccatttcggactgggagcgagcgcggcgcaggcactgaaggcggcggcggggccagaggctcagcggctcccaggtgcgggagagaggcctgctgaaaatgactgaatataaacttgtggtagttggagctgttggcgtaggcaagagtgccttgacgatacagctaattcagaatcattttgtggacgaatatgatccaacaatagaggattcctacaggaagcaagtagtaattgatggagaaacctgtctcttggatattctcgacacagcaggtcaagaggagtacagtgcaatgagggaccagtacatgaggactggggagggctttctttgtgtatttgccataaataatactaaatcatttgaagatattcaccattatagagaacaaattaaaagagttaaggactctgaagatgtacctatggtcctagtaggaaataaatgtgatttgccttctagaacagtagacacaaaacaggctcaggacttagcaagaagttatggaattccttttattgaaacatcagcaaagacaagacagggtgttgatgatgccttctatacattagttcgagaaattcgaaaacataaagaaaagatgagcaaagatggtaaaaagaagaaaaagaagtcaaagacaaagtgtgtaattatgtaaatacaatttgtacttttttcttaaggcatactagtacaagtggtaatttttgtacattacactaaattattagcatttgttttagcattacctaatttttttcctgctccatgcagactgttagcttttaccttaaatgcttattttaaaatgacagtggaagtttttttttcctctaagtgccagtattcccagagttttggtttttgaactagcaatgcctgtgaaaaagaaactgaatacctaagatttctgtcttggggtttttggtgcatgcagttgattacttcttatttttcttaccaattgtgaatgttggtgtgaaacaaattaatgaagcttttgaatcatccctattctgtgttttatctagtcacataaatggattaattactaatttcagttgagaccttctaattggtttttactgaaacattgagggaacacaaatttatgggcttcctgatgatgattcttctaggcatcatgtcctatagtttgtcatccctgatgaatgtaaagttacactgttcacaaaggttttgtctcctttccactgctattagtcatggtcactctccccaaaatattatattttttctataaaaagaaaaaaatggaaaaaaattacaaggcaatggaaactattataaggccatttccttttcacattagataaattactataaagactcctaatagcttttcctgttaaggcagacccagtatgaaatggggattattatagcaaccattttggggctatatttacatgctactaaatttttataataattgaaaagattttaacaagtataaaaaattctcataggaattaaatgtagtctccctgtgtcagactgctctttcatagtataactttaaatcttttcttcaacttgagtctttgaagatagttttaattctgcttgtgacattaaaagattatttgggccagttatagcttattaggtgttgaagagaccaaggttgcaaggccaggccctgtgtgaacctttgagctttcatagagagtttcacagcatggactgtgtccccacggtcatccagtgttgtcatgcattggttagtcaaaatggggagggactagggcagtttggatagctcaacaagatacaatctcactctgtggtggtcctgctgacaaatcaagagcattgcttttgtttcttaagaaaacaaactcttttttaaaaattacttttaaatattaactcaaaagttgagattttggggtggtggtgtgccaagacattaattttttttttaaacaatgaagtgaaaaagttttacaatctctaggtttggctagttctcttaacactggttaaattaacattgcataaacacttttcaagtctgatccatatttaataatgctttaaaataaaaataaaaacaatccttttgataaatttaaaatgttacttattttaaaataaatgaagtgagatggcatggtgaggtgaaagtatcactggactaggaagaaggtgacttaggttctagataggtgtcttttaggactctgattttgaggacatcacttactatccatttcttcatgttaaaagaagtcatctcaaactcttagttttttttttttacaactatgtaatttatattccatttacataaggatacacttatttgtcaagctcagcacaatctgtaaatttttaacctatgttacaccatcttcagtgccagtcttgggcaaaattgtgcaagaggtgaagtttatatttgaatatccattctcgttttaggactcttcttccatattagtgtcatcttgcctccctaccttccacatgccccatgacttgatgcagttttaatacttgtaattcccctaaccataagatttactgctgctgtggatatctccatgaagttttcccactgagtcacatcagaaatgccctacatcttatttcctcagggctcaagagaatctgacagataccataaagggatttgacctaatcactaattttcaggtggtggctgatgctttgaacatctctttgctgcccaatccattagcgacagtaggatttttcaaacctggtatgaatagacagaaccctatccagtggaaggagaatttaataaagatagtgctgaaagaattccttaggtaatctataactaggactactcctggtaacagtaatacattccattgttttagtaaccagaaatcttcatgcaatgaaaaatactttaattcatgaagcttactttttttttttggtgtcagagtctcgctcttgtcacccaggctggaatgcagtggcgccatctcagctcactgcaacctccatctcccaggttcaagcgattctcgtgcctcggcctcctgagtagctgggattacaggcgtgtgccactacactcaactaatttttgtatttttaggagagacggggtttcaccctgttggccaggctggtctcgaactcctgacctcaagtgattcacccaccttggcctcataaacctgttttgcagaactcatttattcagcaaatatttattgagtgcctaccagatgccagtcaccgcacaaggcactgggtatatggtatccccaaacaagagacataatcccggtccttaggtagtgctagtgtggtctgtaatatcttactaaggcctttggtatacgacccagagataacacgatgcgtattttagttttgcaaagaaggggtttggtctctgtgccagctctataattgttttgctacgattccactgaaactcttcgatcaagctactttatgtaaatcacttcattgttttaaaggaataaacttgattatattgtttttttatttggcataactgtgattcttttaggacaattactgtacacattaaggtgtatgtcagatattcatattgacccaaatgtgtaatattccagttttctctgcataagtaattaaaatatacttaaaaattaatagttttatctgggtacaaataaacaggtgcctgaactagttcacagacaaggaaacttctatgtaaaaatcactatgatttctgaattgctatgtgaaactacagatctttggaacactgtttaggtagggtgttaagacttacacagtacctcgtttctacacagagaaagaaatggccatacttcaggaactgcagtgcttatgaggggatatttaggcctcttgaatttttgatgtagatgggcatttttttaaggtagtggttaattacctttatgtgaactttgaatggtttaacaaaagatttgtttttgtagagattttaaagggggagaattctagaaataaatgttacctaattattacagccttaaagacaaaaatccttgttgaagtttttttaaaaaaagctaaattacatagacttaggcattaacatgtttgtggaagaatatagcagacgtatattgtatcatttgagtgaatgttcccaagtaggcattctaggctctatttaactgagtcacactgcataggaatttagaacctaacttttataggttatcaaaactgttgtcaccattgcacaattttgtcctaatatatacatagaaactttgtggggcatgttaagttacagtttgcacaagttcatctcatttgtattccattgattttttttttcttctaaacattttttcttcaaacagtatataactttttttaggggatttttttttagacagcaaaaactatctgaagatttccatttgtcaaaaagtaatgatttcttgataattgtgtagtaatgttttttagaacccagcagttaccttaaagctgaatttatatttagtaacttctgtgttaatactggatagcatgaattctgcattgagaaactgaatagctgtcataaaatgaaactttctttctaaagaaagatactcacatgagttcttgaagaatagtcataactagattaagatctgtgttttagtttaatagtttgaagtgcctgtttgggataatgataggtaatttagatgaatttaggggaaaaaaaagttatctgcagatatgttgagggcccatctctccccccacacccccacagagctaactgggttacagtgttttatccgaaagtttccaattccactgtcttgtgttttcatgttgaaaatacttttgcatttttcctttgagtgccaatttcttactagtactatttcttaatgtaacatgtttacctggaatgtattttaactatttttgtatagtgtaaactgaaacatgcacattttgtacattgtgctttcttttgtgggacatatgcagtgtgatccagttgttttccatcatttggttgcgctgacctaggaatgttggtcatatcaaacattaaaaatgaccactcttttaattgaaattaacttttaaatgtttataggagtatgtgctgtgaagtgatctaaaatttgtaatatttttgtcatgaactgtactactcctaattattgtaatgtaataaaaatagttacagtgacaaaaaaaaaaaaaaa

SEQ ID NO: 42 - protein, 188 aa, Artificial sequence
  Synthetic Construct
MTEYKLVVVGAVGVGKSALTIQLIQNHFVDEYDPTIEDSYRKQVVIDGETCLLDILDTAGQEEYSAMRDQYMRTGEGFLCVFAINNTKSFEDIHHYREQIKRVKDSEDVPMVLVGNKCDLPSRTVDTKQAQDLARSYGIPFIETSAKTRQGVDDAFYTLVREIRKHKEKMSKDGKKKKKKSKTKCVIM

SEQ ID NO: 43 - DNA, 5312 bp, Artificial sequence
  /note="Description of Artificial Sequence: mutated Homo sapiens v-Ki-ras2 Kirsten rat sarcoma viral oncogene homolog (KRAS), transcript variant b, mutation KRAS_ G12S"
  CDS (182)..(748)
ggccgcggcggcggaggcagcagcggcggcggcagtggcggcggcgaaggtggcggcggctcggccagtactcccggcccccgccatttcggactgggagcgagcgcggcgcaggcactgaaggcggcggcggggccagaggctcagcggctcccaggtgcgggagagaggcctgctgaaaatgactgaatataaacttgtggtagttggagctagtggcgtaggcaagagtgccttgacgatacagctaattcagaatcattttgtggacgaatatgatccaacaatagaggattcctacaggaagcaagtagtaattgatggagaaacctgtctcttggatattctcgacacagcaggtcaagaggagtacagtgcaatgagggaccagtacatgaggactggggagggctttctttgtgtatttgccataaataatactaaatcatttgaagatattcaccattatagagaacaaattaaaagagttaaggactctgaagatgtacctatggtcctagtaggaaataaatgtgatttgccttctagaacagtagacacaaaacaggctcaggacttagcaagaagttatggaattccttttattgaaacatcagcaaagacaagacagggtgttgatgatgccttctatacattagttcgagaaattcgaaaacataaagaaaagatgagcaaagatggtaaaaagaagaaaaagaagtcaaagacaaagtgtgtaattatgtaaatacaatttgtacttttttcttaaggcatactagtacaagtggtaatttttgtacattacactaaattattagcatttgttttagcattacctaatttttttcctgctccatgcagactgttagcttttaccttaaatgcttattttaaaatgacagtggaagtttttttttcctctaagtgccagtattcccagagttttggtttttgaactagcaatgcctgtgaaaaagaaactgaatacctaagatttctgtcttggggtttttggtgcatgcagttgattacttcttatttttcttaccaattgtgaatgttggtgtgaaacaaattaatgaagcttttgaatcatccctattctgtgttttatctagtcacataaatggattaattactaatttcagttgagaccttctaattggtttttactgaaacattgagggaacacaaatttatgggcttcctgatgatgattcttctaggcatcatgtcctatagtttgtcatccctgatgaatgtaaagttacactgttcacaaaggttttgtctcctttccactgctattagtcatggtcactctccccaaaatattatattttttctataaaaagaaaaaaatggaaaaaaattacaaggcaatggaaactattataaggccatttccttttcacattagataaattactataaagactcctaatagcttttcctgttaaggcagacccagtatgaaatggggattattatagcaaccattttggggctatatttacatgctactaaatttttataataattgaaaagattttaacaagtataaaaaattctcataggaattaaatgtagtctccctgtgtcagactgctctttcatagtataactttaaatcttttcttcaacttgagtctttgaagatagttttaattctgcttgtgacattaaaagattatttgggccagttatagcttattaggtgttgaagagaccaaggttgcaaggccaggccctgtgtgaacctttgagctttcatagagagtttcacagcatggactgtgtccccacggtcatccagtgttgtcatgcattggttagtcaaaatggggagggactagggcagtttggatagctcaacaagatacaatctcactctgtggtggtcctgctgacaaatcaagagcattgcttttgtttcttaagaaaacaaactcttttttaaaaattacttttaaatattaactcaaaagttgagattttggggtggtggtgtgccaagacattaattttttttttaaacaatgaagtgaaaaagttttacaatctctaggtttggctagttctcttaacactggttaaattaacattgcataaacacttttcaagtctgatccatatttaataatgctttaaaataaaaataaaaacaatccttttgataaatttaaaatgttacttattttaaaataaatgaagtgagatggcatggtgaggtgaaagtatcactggactaggaagaaggtgacttaggttctagataggtgtcttttaggactctgattttgaggacatcacttactatccatttcttcatgttaaaagaagtcatctcaaactcttagttttttttttttacaactatgtaatttatattccatttacataaggatacacttatttgtcaagctcagcacaatctgtaaatttttaacctatgttacaccatcttcagtgccagtcttgggcaaaattgtgcaagaggtgaagtttatatttgaatatccattctcgttttaggactcttcttccatattagtgtcatcttgcctccctaccttccacatgccccatgacttgatgcagttttaatacttgtaattcccctaaccataagatttactgctgctgtggatatctccatgaagttttcccactgagtcacatcagaaatgccctacatcttatttcctcagggctcaagagaatctgacagataccataaagggatttgacctaatcactaattttcaggtggtggctgatgctttgaacatctctttgctgcccaatccattagcgacagtaggatttttcaaacctggtatgaatagacagaaccctatccagtggaaggagaatttaataaagatagtgctgaaagaattccttaggtaatctataactaggactactcctggtaacagtaatacattccattgttttagtaaccagaaatcttcatgcaatgaaaaatactttaattcatgaagcttactttttttttttggtgtcagagtctcgctcttgtcacccaggctggaatgcagtggcgccatctcagctcactgcaacctccatctcccaggttcaagcgattctcgtgcctcggcctcctgagtagctgggattacaggcgtgtgccactacactcaactaatttttgtatttttaggagagacggggtttcaccctgttggccaggctggtctcgaactcctgacctcaagtgattcacccaccttggcctcataaacctgttttgcagaactcatttattcagcaaatatttattgagtgcctaccagatgccagtcaccgcacaaggcactgggtatatggtatccccaaacaagagacataatcccggtccttaggtagtgctagtgtggtctgtaatatcttactaaggcctttggtatacgacccagagataacacgatgcgtattttagttttgcaaagaaggggtttggtctctgtgccagctctataattgttttgctacgattccactgaaactcttcgatcaagctactttatgtaaatcacttcattgttttaaaggaataaacttgattatattgtttttttatttggcataactgtgattcttttaggacaattactgtacacattaaggtgtatgtcagatattcatattgacccaaatgtgtaatattccagttttctctgcataagtaattaaaatatacttaaaaattaatagttttatctgggtacaaataaacaggtgcctgaactagttcacagacaaggaaacttctatgtaaaaatcactatgatttctgaattgctatgtgaaactacagatctttggaacactgtttaggtagggtgttaagacttacacagtacctcgtttctacacagagaaagaaatggccatacttcaggaactgcagtgcttatgaggggatatttaggcctcttgaatttttgatgtagatgggcatttttttaaggtagtggttaattacctttatgtgaactttgaatggtttaacaaaagatttgtttttgtagagattttaaagggggagaattctagaaataaatgttacctaattattacagccttaaagacaaaaatccttgttgaagtttttttaaaaaaagctaaattacatagacttaggcattaacatgtttgtggaagaatatagcagacgtatattgtatcatttgagtgaatgttcccaagtaggcattctaggctctatttaactgagtcacactgcataggaatttagaacctaacttttataggttatcaaaactgttgtcaccattgcacaattttgtcctaatatatacatagaaactttgtggggcatgttaagttacagtttgcacaagttcatctcatttgtattccattgattttttttttcttctaaacattttttcttcaaacagtatataactttttttaggggatttttttttagacagcaaaaactatctgaagatttccatttgtcaaaaagtaatgatttcttgataattgtgtagtaatgttttttagaacccagcagttaccttaaagctgaatttatatttagtaacttctgtgttaatactggatagcatgaattctgcattgagaaactgaatagctgtcataaaatgaaactttctttctaaagaaagatactcacatgagttcttgaagaatagtcataactagattaagatctgtgttttagtttaatagtttgaagtgcctgtttgggataatgataggtaatttagatgaatttaggggaaaaaaaagttatctgcagatatgttgagggcccatctctccccccacacccccacagagctaactgggttacagtgttttatccgaaagtttccaattccactgtcttgtgttttcatgttgaaaatacttttgcatttttcctttgagtgccaatttcttactagtactatttcttaatgtaacatgtttacctggaatgtattttaactatttttgtatagtgtaaactgaaacatgcacattttgtacattgtgctttcttttgtgggacatatgcagtgtgatccagttgttttccatcatttggttgcgctgacctaggaatgttggtcatatcaaacattaaaaatgaccactcttttaattgaaattaacttttaaatgtttataggagtatgtgctgtgaagtgatctaaaatttgtaatatttttgtcatgaactgtactactcctaattattgtaatgtaataaaaatagttacagtgacaaaaaaaaaaaaaaa

SEQ ID NO: 44 - protein, 188 aa, Artificial sequence [sequence omitted]

SEQ ID NO: 45 - DNA, 5312 bp, Artificial sequence
  /note="Description of Artificial Sequence: mutated Homo sapiens v-Ki-ras2 Kirsten rat sarcoma viral oncogene homolog (KRAS), transcript variant b, mutation KRAS_ G12A"
  CDS (182)..(748)
ggccgcggcggcggaggcagcagcggcggcggcagtggcggcggcgaaggtggcggcggctcggccagtactcccggcccccgccatttcggactgggagcgagcgcggcgcaggcactgaaggcggcggcggggccagaggctcagcggctcccaggtgcgggagagaggcctgctgaaaatgactgaatataaacttgtggtagttggagctgctggcgtaggcaagagtgccttgacgatacagctaattcagaatcattttgtggacgaatatgatccaacaatagaggattcctacaggaagcaagtagtaattgatggagaaacctgtctcttggatattctcgacacagcaggtcaagaggagtacagtgcaatgagggaccagtacatgaggactggggagggctttctttgtgtatttgccataaataatactaaatcatttgaagatattcaccattatagagaacaaattaaaagagttaaggactctgaagatgtacctatggtcctagtaggaaataaatgtgatttgccttctagaacagtagacacaaaacaggctcaggacttagcaagaagttatggaattccttttattgaaacatcagcaaagacaagacagggtgttgatgatgccttctatacattagttcgagaaattcgaaaacataaagaaaagatgagcaaagatggtaaaaagaagaaaaagaagtcaaagacaaagtgtgtaattatgtaaatacaatttgtacttttttcttaaggcatactagtacaagtggtaatttttgtacattacactaaattattagcatttgttttagcattacctaatttttttcctgctccatgcagactgttagcttttaccttaaatgcttattttaaaatgacagtggaagtttttttttcctctaagtgccagtattcccagagttttggtttttgaactagcaatgcctgtgaaaaagaaactgaatacctaagatttctgtcttggggtttttggtgcatgcagttgattacttcttatttttcttaccaattgtgaatgttggtgtgaaacaaattaatgaagcttttgaatcatccctattctgtgttttatctagtcacataaatggattaattactaatttcagttgagaccttctaattggtttttactgaaacattgagggaacacaaatttatgggcttcctgatgatgattcttctaggcatcatgtcctatagtttgtcatccctgatgaatgtaaagttacactgttcacaaaggttttgtctcctttccactgctattagtcatggtcactctccccaaaatattatattttttctataaaaagaaaaaaatggaaaaaaattacaaggcaatggaaactattataaggccatttccttttcacattagataaattactataaagactcctaatagcttttcctgttaaggcagacccagtatgaaatggggattattatagcaaccattttggggctatatttacatgctactaaatttttataataattgaaaagattttaacaagtataaaaaattctcataggaattaaatgtagtctccctgtgtcagactgctctttcatagtataactttaaatcttttcttcaacttgagtctttgaagatagttttaattctgcttgtgacattaaaagattatttgggccagttatagcttattaggtgttgaagagaccaaggttgcaaggccaggccctgtgtgaacctttgagctttcatagagagtttcacagcatggactgtgtccccacggtcatccagtgttgtcatgcattggttagtcaaaatggggagggactagggcagtttggatagctcaacaagatacaatctcactctgtggtggtcctgctgacaaatcaagagcattgcttttgtttcttaagaaaacaaactcttttttaaaaattacttttaaatattaactcaaaagttgagattttggggtggtggtgtgccaagacattaattttttttttaaacaatgaagtgaaaaagttttacaatctctaggtttggctagttctcttaacactggttaaattaacattgcataaacacttttcaagtctgatccatatttaataatgctttaaaataaaaataaaaacaatccttttgataaatttaaaatgttacttattttaaaataaatgaagtgagatggcatggtgaggtgaaagtatcactggactaggaagaaggtgacttaggttctagataggtgtcttttaggactctgattttgaggacatcacttactatccatttcttcatgttaaaagaagtcatctcaaactcttagttttttttttttacaactatgtaatttatattccatttacataaggatacacttatttgtcaagctcagcacaatctgtaaatttttaacctatgttacaccatcttcagtgccagtcttgggcaaaattgtgcaagaggtgaagtttatatttgaatatccattctcgttttaggactcttcttccatattagtgtcatcttgcctccctaccttccacatgccccatgacttgatgcagttttaatacttgtaattcccctaaccataagatttactgctgctgtggatatctccatgaagttttcccactgagtcacatcagaaatgccctacatcttatttcctcagggctcaagagaatctgacagataccataaagggatttgacctaatcactaattttcaggtggtggctgatgctttgaacatctctttgctgcccaatccattagcgacagtaggatttttcaaacctggtatgaatagacagaaccctatccagtggaaggagaatttaataaagatagtgctgaaagaattccttaggtaatctataactaggactactcctggtaacagtaatacattccattgttttagtaaccagaaatcttcatgcaatgaaaaatactttaattcatgaagcttactttttttttttggtgtcagagtctcgctcttgtcacccaggctggaatgcagtggcgccatctcagctcactgcaacctccatctcccaggttcaagcgattctcgtgcctcggcctcctgagtagctgggattacaggcgtgtgccactacactcaactaatttttgtatttttaggagagacggggtttcaccctgttggccaggctggtctcgaactcctgacctcaagtgattcacccaccttggcctcataaacctgttttgcagaactcatttattcagcaaatatttattgagtgcctaccagatgccagtcaccgcacaaggcactgggtatatggtatccccaaacaagagacataatcccggtccttaggtagtgctagtgtggtctgtaatatcttactaaggcctttggtatacgacccagagataacacgatgcgtattttagttttgcaaagaaggggtttggtctctgtgccagctctataattgttttgctacgattccactgaaactcttcgatcaagctactttatgtaaatcacttcattgttttaaaggaataaacttgattatattgtttttttatttggcataactgtgattcttttaggacaattactgtacacattaaggtgtatgtcagatattcatattgacccaaatgtgtaatattccagttttctctgcataagtaattaaaatatacttaaaaattaatagttttatctgggtacaaataaacaggtgcctgaactagttcacagacaaggaaacttctatgtaaaaatcactatgatttctgaattgctatgtgaaactacagatctttggaacactgtttaggtagggtgttaagacttacacagtacctcgtttctacacagagaaagaaatggccatacttcaggaactgcagtgcttatgaggggatatttaggcctcttgaatttttgatgtagatgggcatttttttaaggtagtggttaattacctttatgtgaactttgaatggtttaacaaaagatttgtttttgtagagattttaaagggggagaattctagaaataaatgttacctaattattacagccttaaagacaaaaatccttgttgaagtttttttaaaaaaagctaaattacatagacttaggcattaacatgtttgtggaagaatatagcagacgtatattgtatcatttgagtgaatgttcccaagtaggcattctaggctctatttaactgagtcacactgcataggaatttagaacctaacttttataggttatcaaaactgttgtcaccattgcacaattttgtcctaatatatacatagaaactttgtggggcatgttaagttacagtttgcacaagttcatctcatttgtattccattgattttttttttcttctaaacattttttcttcaaacagtatataactttttttaggggatttttttttagacagcaaaaactatctgaagatttccatttgtcaaaaagtaatgatttcttgataattgtgtagtaatgttttttagaacccagcagttaccttaaagctgaatttatatttagtaacttctgtgttaatactggatagcatgaattctgcattgagaaactgaatagctgtcataaaatgaaactttctttctaaagaaagatactcacatgagttcttgaagaatagtcataactagattaagatctgtgttttagtttaatagtttgaagtgcctgtttgggataatgataggtaatttagatgaatttaggggaaaaaaaagttatctgcagatatgttgagggcccatctctccccccacacccccacagagctaactgggttacagtgttttatccgaaagtttccaattccactgtcttgtgttttcatgttgaaaatacttttgcatttttcctttgagtgccaatttcttactagtactatttcttaatgtaacatgtttacctggaatgtattttaactatttttgtatagtgtaaactgaaacatgcacattttgtacattgtgctttcttttgtgggacatatgcagtgtgatccagttgttttccatcatttggttgcgctgacctaggaatgttggtcatatcaaacattaaaaatgaccactcttttaattgaaattaacttttaaatgtttataggagtatgtgctgtgaagtgatctaaaatttgtaatatttttgtcatgaactgtactactcctaattattgtaatgtaataaaaatagttacagtgacaaaaaaaaaaaaaaa

SEQ ID NO: 46 - protein, 188 aa, Artificial sequence [sequence omitted]

SEQ ID NO: 47 - DNA, 5312 bp, Artificial sequence
  /note="Description of Artificial Sequence: mutated Homo sapiens v-Ki-ras2 Kirsten rat sarcoma viral oncogene homolog (KRAS), transcript variant b, mutation KRAS_ G12D"
  CDS (182)..(748)
ggccgcggcggcggaggcagcagcggcggcggcagtggcggcggcgaaggtggcggcggctcggccagtactcccggcccccgccatttcggactgggagcgagcgcggcgcaggcactgaaggcggcggcggggccagaggctcagcggctcccaggtgcgggagagaggcctgctgaaaatgactgaatataaacttgtggtagttggagctgatggcgtaggcaagagtgccttgacgatacagctaattcagaatcattttgtggacgaatatgatccaacaatagaggattcctacaggaagcaagtagtaattgatggagaaacctgtctcttggatattctcgacacagcaggtcaagaggagtacagtgcaatgagggaccagtacatgaggactggggagggctttctttgtgtatttgccataaataatactaaatcatttgaagatattcaccattatagagaacaaattaaaagagttaaggactctgaagatgtacctatggtcctagtaggaaataaatgtgatttgccttctagaacagtagacacaaaacaggctcaggacttagcaagaagttatggaattccttttattgaaacatcagcaaagacaagacagggtgttgatgatgccttctatacattagttcgagaaattcgaaaacataaagaaaagatgagcaaagatggtaaaaagaagaaaaagaagtcaaagacaaagtgtgtaattatgtaaatacaatttgtacttttttcttaaggcatactagtacaagtggtaatttttgtacattacactaaattattagcatttgttttagcattacctaatttttttcctgctccatgcagactgttagcttttaccttaaatgcttattttaaaatgacagtggaagtttttttttcctctaagtgccagtattcccagagttttggtttttgaactagcaatgcctgtgaaaaagaaactgaatacctaagatttctgtcttggggtttttggtgcatgcagttgattacttcttatttttcttaccaattgtgaatgttggtgtgaaacaaattaatgaagcttttgaatcatccctattctgtgttttatctagtcacataaatggattaattactaatttcagttgagaccttctaattggtttttactgaaacattgagggaacacaaatttatgggcttcctgatgatgattcttctaggcatcatgtcctatagtttgtcatccctgatgaatgtaaagttacactgttcacaaaggttttgtctcctttccactgctattagtcatggtcactctccccaaaatattatattttttctataaaaagaaaaaaatggaaaaaaattacaaggcaatggaaactattataaggccatttccttttcacattagataaattactataaagactcctaatagcttttcctgttaaggcagacccagtatgaaatggggattattatagcaaccattttggggctatatttacatgctactaaatttttataataattgaaaagattttaacaagtataaaaaattctcataggaattaaatgtagtctccctgtgtcagactgctctttcatagtataactttaaatcttttcttcaacttgagtctttgaagatagttttaattctgcttgtgacattaaaagattatttgggccagttatagcttattaggtgttgaagagaccaaggttgcaaggccaggccctgtgtgaacctttgagctttcatagagagtttcacagcatggactgtgtccccacggtcatccagtgttgtcatgcattggttagtcaaaatggggagggactagggcagtttggatagctcaacaagatacaatctcactctgtggtggtcctgctgacaaatcaagagcattgcttttgtttcttaagaaaacaaactcttttttaaaaattacttttaaatattaactcaaaagttgagattttggggtggtggtgtgccaagacattaattttttttttaaacaatgaagtgaaaaagttttacaatctctaggtttggctagttctcttaacactggttaaattaacattgcataaacacttttcaagtctgatccatatttaataatgctttaaaataaaaataaaaacaatccttttgataaatttaaaatgttacttattttaaaataaatgaagtgagatggcatggtgaggtgaaagtatcactggactaggaagaaggtgacttaggttctagataggtgtcttttaggactctgattttgaggacatcacttactatccatttcttcatgttaaaagaagtcatctcaaactcttagttttttttttttacaactatgtaatttatattccatttacataaggatacacttatttgtcaagctcagcacaatctgtaaatttttaacctatgttacaccatcttcagtgccagtcttgggcaaaattgtgcaagaggtgaagtttatatttgaatatccattctcgttttaggactcttcttccatattagtgtcatcttgcctccctaccttccacatgccccatgacttgatgcagttttaatacttgtaattcccctaaccataagatttactgctgctgtggatatctccatgaagttttcccactgagtcacatcagaaatgccctacatcttatttcctcagggctcaagagaatctgacagataccataaagggatttgacctaatcactaattttcaggtggtggctgatgctttgaacatctctttgctgcccaatccattagcgacagtaggatttttcaaacctggtatgaatagacagaaccctatccagtggaaggagaatttaataaagatagtgctgaaagaattccttaggtaatctataactaggactactcctggtaacagtaatacattccattgttttagtaaccagaaatcttcatgcaatgaaaaatactttaattcatgaagcttactttttttttttggtgtcagagtctcgctcttgtcacccaggctggaatgcagtggcgccatctcagctcactgcaacctccatctcccaggttcaagcgattctcgtgcctcggcctcctgagtagctgggattacaggcgtgtgccactacactcaactaatttttgtatttttaggagagacggggtttcaccctgttggccaggctggtctcgaactcctgacctcaagtgattcacccaccttggcctcataaacctgttttgcagaactcatttattcagcaaatatttattgagtgcctaccagatgccagtcaccgcacaaggcactgggtatatggtatccccaaacaagagacataatcccggtccttaggtagtgctagtgtggtctgtaatatcttactaaggcctttggtatacgacccagagataacacgatgcgtattttagttttgcaaagaaggggtttggtctctgtgccagctctataattgttttgctacgattccactgaaactcttcgatcaagctactttatgtaaatcacttcattgttttaaaggaataaacttgattatattgtttttttatttggcataactgtgattcttttaggacaattactgtacacattaaggtgtatgtcagatattcatattgacccaaatgtgtaatattccagttttctctgcataagtaattaaaatatacttaaaaattaatagttttatctgggtacaaataaacaggtgcctgaactagttcacagacaaggaaacttctatgtaaaaatcactatgatttctgaattgctatgtgaaactacagatctttggaacactgtttaggtagggtgttaagacttacacagtacctcgtttctacacagagaaagaaatggccatacttcaggaactgcagtgcttatgaggggatatttaggcctcttgaatttttgatgtagatgggcatttttttaaggtagtggttaattacctttatgtgaactttgaatggtttaacaaaagatttgtttttgtagagattttaaagggggagaattctagaaataaatgttacctaattattacagccttaaagacaaaaatccttgttgaagtttttttaaaaaaagctaaattacatagacttaggcattaacatgtttgtggaagaatatagcagacgtatattgtatcatttgagtgaatgttcccaagtaggcattctaggctctatttaactgagtcacactgcataggaatttagaacctaacttttataggttatcaaaactgttgtcaccattgcacaattttgtcctaatatatacatagaaactttgtggggcatgttaagttacagtttgcacaagttcatctcatttgtattccattgattttttttttcttctaaacattttttcttcaaacagtatataactttttttaggggatttttttttagacagcaaaaactatctgaagatttccatttgtcaaaaagtaatgatttcttgataattgtgtagtaatgttttttagaacccagcagttaccttaaagctgaatttatatttagtaacttctgtgttaatactggatagcatgaattctgcattgagaaactgaatagctgtcataaaatgaaactttctttctaaagaaagatactcacatgagttcttgaagaatagtcataactagattaagatctgtgttttagtttaatagtttgaagtgcctgtttgggataatgataggtaatttagatgaatttaggggaaaaaaaagttatctgcagatatgttgagggcccatctctccccccacacccccacagagctaactgggttacagtgttttatccgaaagtttccaattccactgtcttgtgttttcatgttgaaaatacttttgcatttttcctttgagtgccaatttcttactagtactatttcttaatgtaacatgtttacctggaatgtattttaactatttttgtatagtgtaaactgaaacatgcacattttgtacattgtgctttcttttgtgggacatatgcagtgtgatccagttgttttccatcatttggttgcgctgacctaggaatgttggtcatatcaaacattaaaaatgaccactcttttaattgaaattaacttttaaatgtttataggagtatgtgctgtgaagtgatctaaaatttgtaatatttttgtcatgaactgtactactcctaattattgtaatgtaataaaaatagttacagtgacaaaaaaaaaaaaaaa

SEQ ID NO: 48 - protein, 188 aa, Artificial sequence [sequence omitted]

SEQ ID NO: 49 - DNA, 5312 bp, Artificial sequence
  /note="Description of Artificial Sequence: encoding mutated Homo sapiens v-Ki-ras2 Kirsten rat sarcoma viral oncogene homolog (KRAS), transcript variant b, mutation KRAS_ G12C"
  CDS (182)..(748)
ggccgcggcggcggaggcagcagcggcggcggcagtggcggcggcgaaggtggcggcggctcggccagtactcccggcccccgccatttcggactgggagcgagcgcggcgcaggcactgaaggcggcggcggggccagaggctcagcggctcccaggtgcgggagagaggcctgctgaaaatgactgaatataaacttgtggtagttggagcttgtggcgtaggcaagagtgccttgacgatacagctaattcagaatcattttgtggacgaatatgatccaacaatagaggattcctacaggaagcaagtagtaattgatggagaaacctgtctcttggatattctcgacacagcaggtcaagaggagtacagtgcaatgagggaccagtacatgaggactggggagggctttctttgtgtatttgccataaataatactaaatcatttgaagatattcaccattatagagaacaaattaaaagagttaaggactctgaagatgtacctatggtcctagtaggaaataaatgtgatttgccttctagaacagtagacacaaaacaggctcaggacttagcaagaagttatggaattccttttattgaaacatcagcaaagacaagacagggtgttgatgatgccttctatacattagttcgagaaattcgaaaacataaagaaaagatgagcaaagatggtaaaaagaagaaaaagaagtcaaagacaaagtgtgtaattatgtaaatacaatttgtacttttttcttaaggcatactagtacaagtggtaatttttgtacattacactaaattattagcatttgttttagcattacctaatttttttcctgctccatgcagactgttagcttttaccttaaatgcttattttaaaatgacagtggaagtttttttttcctctaagtgccagtattcccagagttttggtttttgaactagcaatgcctgtgaaaaagaaactgaatacctaagatttctgtcttggggtttttggtgcatgcagttgattacttcttatttttcttaccaattgtgaatgttggtgtgaaacaaattaatgaagcttttgaatcatccctattctgtgttttatctagtcacataaatggattaattactaatttcagttgagaccttctaattggtttttactgaaacattgagggaacacaaatttatgggcttcctgatgatgattcttctaggcatcatgtcctatagtttgtcatccctgatgaatgtaaagttacactgttcacaaaggttttgtctcctttccactgctattagtcatggtcactctccccaaaatattatattttttctataaaaagaaaaaaatggaaaaaaattacaaggcaatggaaactattataaggccatttccttttcacattagataaattactataaagactcctaatagcttttcctgttaaggcagacccagtatgaaatggggattattatagcaaccattttggggctatatttacatgctactaaatttttataataattgaaaagattttaacaagtataaaaaattctcataggaattaaatgtagtctccctgtgtcagactgctctttcatagtataactttaaatcttttcttcaacttgagtctttgaagatagttttaattctgcttgtgacattaaaagattatttgggccagttatagcttattaggtgttgaagagaccaaggttgcaaggccaggccctgtgtgaacctttgagctttcatagagagtttcacagcatggactgtgtccccacggtcatccagtgttgtcatgcattggttagtcaaaatggggagggactagggcagtttggatagctcaacaagatacaatctcactctgtggtggtcctgctgacaaatcaagagcattgcttttgtttcttaagaaaacaaactcttttttaaaaattacttttaaatattaactcaaaagttgagattttggggtggtggtgtgccaagacattaattttttttttaaacaatgaagtgaaaaagttttacaatctctaggtttggctagttctcttaacactggttaaattaacattgcataaacacttttcaagtctgatccatatttaataatgctttaaaataaaaataaaaacaatccttttgataaatttaaaatgttacttattttaaaataaatgaagtgagatggcatggtgaggtgaaagtatcactggactaggaagaaggtgacttaggttctagataggtgtcttttaggactctgattttgaggacatcacttactatccatttcttcatgttaaaagaagtcatctcaaactcttagttttttttttttacaactatgtaatttatattccatttacataaggatacacttatttgtcaagctcagcacaatctgtaaatttttaacctatgttacaccatcttcagtgccagtcttgggcaaaattgtgcaagaggtgaagtttatatttgaatatccattctcgttttaggactcttcttccatattagtgtcatcttgcctccctaccttccacatgccccatgacttgatgcagttttaatacttgtaattcccctaaccataagatttactgctgctgtggatatctccatgaagttttcccactgagtcacatcagaaatgccctacatcttatttcctcagggctcaagagaatctgacagataccataaagggatttgacctaatcactaattttcaggtggtggctgatgctttgaacatctctttgctgcccaatccattagcgacagtaggatttttcaaacctggtatgaatagacagaaccctatccagtggaaggagaatttaataaagatagtgctgaaagaattccttaggtaatctataactaggactactcctggtaacagtaatacattccattgttttagtaaccagaaatcttcatgcaatgaaaaatactttaattcatgaagcttactttttttttttggtgtcagagtctcgctcttgtcacccaggctggaatgcagtggcgccatctcagctcactgcaacctccatctcccaggttcaagcgattctcgtgcctcggcctcctgagtagctgggattacaggcgtgtgccactacactcaactaatttttgtatttttaggagagacggggtttcaccctgttggccaggctggtctcgaactcctgacctcaagtgattcacccaccttggcctcataaacctgttttgcagaactcatttattcagcaaatatttattgagtgcctaccagatgccagtcaccgcacaaggcactgggtatatggtatccccaaacaagagacataatcccggtccttaggtagtgctagtgtggtctgtaatatcttactaaggcctttggtatacgacccagagataacacgatgcgtattttagttttgcaaagaaggggtttggtctctgtgccagctctataattgttttgctacgattccactgaaactcttcgatcaagctactttatgtaaatcacttcattgttttaaaggaataaacttgattatattgtttttttatttggcataactgtgattcttttaggacaattactgtacacattaaggtgtatgtcagatattcatattgacccaaatgtgtaatattccagttttctctgcataagtaattaaaatatacttaaaaattaatagttttatctgggtacaaataaacaggtgcctgaactagttcacagacaaggaaacttctatgtaaaaatcactatgatttctgaattgctatgtgaaactacagatctttggaacactgtttaggtagggtgttaagacttacacagtacctcgtttctacacagagaaagaaatggccatacttcaggaactgcagtgcttatgaggggatatttaggcctcttgaatttttgatgtagatgggcatttttttaaggtagtggttaattacctttatgtgaactttgaatggtttaacaaaagatttgtttttgtagagattttaaagggggagaattctagaaataaatgttacctaattattacagccttaaagacaaaaatccttgttgaagtttttttaaaaaaagctaaattacatagacttaggcattaacatgtttgtggaagaatatagcagacgtatattgtatcatttgagtgaatgttcccaagtaggcattctaggctctatttaactgagtcacactgcataggaatttagaacctaacttttataggttatcaaaactgttgtcaccattgcacaattttgtcctaatatatacatagaaactttgtggggcatgttaagttacagtttgcacaagttcatctcatttgtattccattgattttttttttcttctaaacattttttcttcaaacagtatataactttttttaggggatttttttttagacagcaaaaactatctgaagatttccatttgtcaaaaagtaatgatttcttgataattgtgtagtaatgttttttagaacccagcagttaccttaaagctgaatttatatttagtaacttctgtgttaatactggatagcatgaattctgcattgagaaactgaatagctgtcataaaatgaaactttctttctaaagaaagatactcacatgagttcttgaagaatagtcataactagattaagatctgtgttttagtttaatagtttgaagtgcctgtttgggataatgataggtaatttagatgaatttaggggaaaaaaaagttatctgcagatatgttgagggcccatctctccccccacacccccacagagctaactgggttacagtgttttatccgaaagtttccaattccactgtcttgtgttttcatgttgaaaatacttttgcatttttcctttgagtgccaatttcttactagtactatttcttaatgtaacatgtttacctggaatgtattttaactatttttgtatagtgtaaactgaaacatgcacattttgtacattgtgctttcttttgtgggacatatgcagtgtgatccagttgttttccatcatttggttgcgctgacctaggaatgttggtcatatcaaacattaaaaatgaccactcttttaattgaaattaacttttaaatgtttataggagtatgtgctgtgaagtgatctaaaatttgtaatatttttgtcatgaactgtactactcctaattattgtaatgtaataaaaatagttacagtgacaaaaaaaaaaaaaaa

SEQ ID NO: 50 - protein, 188 aa, Artificial sequence
  Synthetic Construct
MTEYKLVVVGACGVGKSALTIQLIQNHFVDEYDPTIEDSYRKQVVIDGETCLLDILDTAGQEEYSAMRDQYMRTGEGFLCVFAINNTKSFEDIHHYREQIKRVKDSEDVPMVLVGNKCDLPSRTVDTKQAQDLARSYGIPFIETSAKTRQGVDDAFYTLVREIRKHKEKMSKDGKKKKKKSKTKCVIM

SEQ ID NO: 51 - DNA, 5312 bp, Artificial sequence
  /note="Description of Artificial Sequence: mutated Homo sapiens v-Ki-ras2 Kirsten rat sarcoma viral oncogene homolog (KRAS), transcript variant b, mutation KRAS_ G12R"
  CDS (182)..(748)
ggccgcggcggcggaggcagcagcggcggcggcagtggcggcggcgaaggtggcggcggctcggccagtactcccggcccccgccatttcggactgggagcgagcgcggcgcaggcactgaaggcggcggcggggccagaggctcagcggctcccaggtgcgggagagaggcctgctgaaaatgactgaatataaacttgtggtagttggagctcgtggcgtaggcaagagtgccttgacgatacagctaattcagaatcattttgtggacgaatatgatccaacaatagaggattcctacaggaagcaagtagtaattgatggagaaacctgtctcttggatattctcgacacagcaggtcaagaggagtacagtgcaatgagggaccagtacatgaggactggggagggctttctttgtgtatttgccataaataatactaaatcatttgaagatattcaccattatagagaacaaattaaaagagttaaggactctgaagatgtacctatggtcctagtaggaaataaatgtgatttgccttctagaacagtagacacaaaacaggctcaggacttagcaagaagttatggaattccttttattgaaacatcagcaaagacaagacagggtgttgatgatgccttctatacattagttcgagaaattcgaaaacataaagaaaagatgagcaaagatggtaaaaagaagaaaaagaagtcaaagacaaagtgtgtaattatgtaaatacaatttgtacttttttcttaaggcatactagtacaagtggtaatttttgtacattacactaaattattagcatttgttttagcattacctaatttttttcctgctccatgcagactgttagcttttaccttaaatgcttattttaaaatgacagtggaagtttttttttcctctaagtgccagtattcccagagttttggtttttgaactagcaatgcctgtgaaaaagaaactgaatacctaagatttctgtcttggggtttttggtgcatgcagttgattacttcttatttttcttaccaattgtgaatgttggtgtgaaacaaattaatgaagcttttgaatcatccctattctgtgttttatctagtcacataaatggattaattactaatttcagttgagaccttctaattggtttttactgaaacattgagggaacacaaatttatgggcttcctgatgatgattcttctaggcatcatgtcctatagtttgtcatccctgatgaatgtaaagttacactgttcacaaaggttttgtctcctttccactgctattagtcatggtcactctccccaaaatattatattttttctataaaaagaaaaaaatggaaaaaaattacaaggcaatggaaactattataaggccatttccttttcacattagataaattactataaagactcctaatagcttttcctgttaaggcagacccagtatgaaatggggattattatagcaaccattttggggctatatttacatgctactaaatttttataataattgaaaagattttaacaagtataaaaaattctcataggaattaaatgtagtctccctgtgtcagactgctctttcatagtataactttaaatcttttcttcaacttgagtctttgaagatagttttaattctgcttgtgacattaaaagattatttgggccagttatagcttattaggtgttgaagagaccaaggttgcaaggccaggccctgtgtgaacctttgagctttcatagagagtttcacagcatggactgtgtccccacggtcatccagtgttgtcatgcattggttagtcaaaatggggagggactagggcagtttggatagctcaacaagatacaatctcactctgtggtggtcctgctgacaaatcaagagcattgcttttgtttcttaagaaaacaaactcttttttaaaaattacttttaaatattaactcaaaagttgagattttggggtggtggtgtgccaagacattaattttttttttaaacaatgaagtgaaaaagttttacaatctctaggtttggctagttctcttaacactggttaaattaacattgcataaacacttttcaagtctgatccatatttaataatgctttaaaataaaaataaaaacaatccttttgataaatttaaaatgttacttattttaaaataaatgaagtgagatggcatggtgaggtgaaagtatcactggactaggaagaaggtgacttaggttctagataggtgtcttttaggactctgattttgaggacatcacttactatccatttcttcatgttaaaagaagtcatctcaaactcttagttttttttttttacaactatgtaatttatattccatttacataaggatacacttatttgtcaagctcagcacaatctgtaaatttttaacctatgttacaccatcttcagtgccagtcttgggcaaaattgtgcaagaggtgaagtttatatttgaatatccattctcgttttaggactcttcttccatattagtgtcatcttgcctccctaccttccacatgccccatgacttgatgcagttttaatacttgtaattcccctaaccataagatttactgctgctgtggatatctccatgaagttttcccactgagtcacatcagaaatgccctacatcttatttcctcagggctcaagagaatctgacagataccataaagggatttgacctaatcactaattttcaggtggtggctgatgctttgaacatctctttgctgcccaatccattagcgacagtaggatttttcaaacctggtatgaatagacagaaccctatccagtggaaggagaatttaataaagatagtgctgaaagaattccttaggtaatctataactaggactactcctggtaacagtaatacattccattgttttagtaaccagaaatcttcatgcaatgaaaaatactttaattcatgaagcttactttttttttttggtgtcagagtctcgctcttgtcacccaggctggaatgcagtggcgccatctcagctcactgcaacctccatctcccaggttcaagcgattctcgtgcctcggcctcctgagtagctgggattacaggcgtgtgccactacactcaactaatttttgtatttttaggagagacggggtttcaccctgttggccaggctggtctcgaactcctgacctcaagtgattcacccaccttggcctcataaacctgttttgcagaactcatttattcagcaaatatttattgagtgcctaccagatgccagtcaccgcacaaggcactgggtatatggtatccccaaacaagagacataatcccggtccttaggtagtgctagtgtggtctgtaatatcttactaaggcctttggtatacgacccagagataacacgatgcgtattttagttttgcaaagaaggggtttggtctctgtgccagctctataattgttttgctacgattccactgaaactcttcgatcaagctactttatgtaaatcacttcattgttttaaaggaataaacttgattatattgtttttttatttggcataactgtgattcttttaggacaattactgtacacattaaggtgtatgtcagatattcatattgacccaaatgtgtaatattccagttttctctgcataagtaattaaaatatacttaaaaattaatagttttatctgggtacaaataaacaggtgcctgaactagttcacagacaaggaaacttctatgtaaaaatcactatgatttctgaattgctatgtgaaactacagatctttggaacactgtttaggtagggtgttaagacttacacagtacctcgtttctacacagagaaagaaatggccatacttcaggaactgcagtgcttatgaggggatatttaggcctcttgaatttttgatgtagatgggcatttttttaaggtagtggttaattacctttatgtgaactttgaatggtttaacaaaagatttgtttttgtagagattttaaagggggagaattctagaaataaatgttacctaattattacagccttaaagacaaaaatccttgttgaagtttttttaaaaaaagctaaattacatagacttaggcattaacatgtttgtggaagaatatagcagacgtatattgtatcatttgagtgaatgttcccaagtaggcattctaggctctatttaactgagtcacactgcataggaatttagaacctaacttttataggttatcaaaactgttgtcaccattgcacaattttgtcctaatatatacatagaaactttgtggggcatgttaagttacagtttgcacaagttcatctcatttgtattccattgattttttttttcttctaaacattttttcttcaaacagtatataactttttttaggggatttttttttagacagcaaaaactatctgaagatttccatttgtcaaaaagtaatgatttcttgataattgtgtagtaatgttttttagaacccagcagttaccttaaagctgaatttatatttagtaacttctgtgttaatactggatagcatgaattctgcattgagaaactgaatagctgtcataaaatgaaactttctttctaaagaaagatactcacatgagttcttgaagaatagtcataactagattaagatctgtgttttagtttaatagtttgaagtgcctgtttgggataatgataggtaatttagatgaatttaggggaaaaaaaagttatctgcagatatgttgagggcccatctctccccccacacccccacagagctaactgggttacagtgttttatccgaaagtttccaattccactgtcttgtgttttcatgttgaaaatacttttgcatttttcctttgagtgccaatttcttactagtactatttcttaatgtaacatgtttacctggaatgtattttaactatttttgtatagtgtaaactgaaacatgcacattttgtacattgtgctttcttttgtgggacatatgcagtgtgatccagttgttttccatcatttggttgcgctgacctaggaatgttggtcatatcaaacattaaaaatgaccactcttttaattgaaattaacttttaaatgtttataggagtatgtgctgtgaagtgatctaaaatttgtaatatttttgtcatgaactgtactactcctaattattgtaatgtaataaaaatagttacagtgacaaaaaaaaaaaaaaa

SEQ ID NO: 52 - protein, 188 aa, Artificial sequence
  Synthetic Construct
MTEYKLVVVGARGVGKSALTIQLIQNHFVDEYDPTIEDSYRKQVVIDGETCLLDILDTAGQEEYSAMRDQYMRTGEGFLCVFAINNTKSFEDIHHYREQIKRVKDSEDVPMVLVGNKCDLPSRTVDTKQAQDLARSYGIPFIETSAKTRQGVDDAFYTLVREIRKHKEKMSKDGKKKKKKSKTKCVIM

SEQ ID NO: 53 - DNA, 5312 bp, Artificial sequence
  /note="Description of Artificial Sequence: mutated Homo sapiens v-Ki-ras2 Kirsten rat sarcoma viral oncogene homolog (KRAS), transcript variant b, mutation KRAS_ G12F"
  CDS (182)..(748)
ggccgcggcggcggaggcagcagcggcggcggcagtggcggcggcgaaggtggcggcggctcggccagtactcccggcccccgccatttcggactgggagcgagcgcggcgcaggcactgaaggcggcggcggggccagaggctcagcggctcccaggtgcgggagagaggcctgctgaaaatgactgaatataaacttgtggtagttggagcttttggcgtaggcaagagtgccttgacgatacagctaattcagaatcattttgtggacgaatatgatccaacaatagaggattcctacaggaagcaagtagtaattgatggagaaacctgtctcttggatattctcgacacagcaggtcaagaggagtacagtgcaatgagggaccagtacatgaggactggggagggctttctttgtgtatttgccataaataatactaaatcatttgaagatattcaccattatagagaacaaattaaaagagttaaggactctgaagatgtacctatggtcctagtaggaaataaatgtgatttgccttctagaacagtagacacaaaacaggctcaggacttagcaagaagttatggaattccttttattgaaacatcagcaaagacaagacagggtgttgatgatgccttctatacattagttcgagaaattcgaaaacataaagaaaagatgagcaaagatggtaaaaagaagaaaaagaagtcaaagacaaagtgtgtaattatgtaaatacaatttgtacttttttcttaaggcatactagtacaagtggtaatttttgtacattacactaaattattagcatttgttttagcattacctaatttttttcctgctccatgcagactgttagcttttaccttaaatgcttattttaaaatgacagtggaagtttttttttcctctaagtgccagtattcccagagttttggtttttgaactagcaatgcctgtgaaaaagaaactgaatacctaagatttctgtcttggggtttttggtgcatgcagttgattacttcttatttttcttaccaattgtgaatgttggtgtgaaacaaattaatgaagcttttgaatcatccctattctgtgttttatctagtcacataaatggattaattactaatttcagttgagaccttctaattggtttttactgaaacattgagggaacacaaatttatgggcttcctgatgatgattcttctaggcatcatgtcctatagtttgtcatccctgatgaatgtaaagttacactgttcacaaaggttttgtctcctttccactgctattagtcatggtcactctccccaaaatattatattttttctataaaaagaaaaaaatggaaaaaaattacaaggcaatggaaactattataaggccatttccttttcacattagataaattactataaagactcctaatagcttttcctgttaaggcagacccagtatgaaatggggattattatagcaaccattttggggctatatttacatgctactaaatttttataataattgaaaagattttaacaagtataaaaaattctcataggaattaaatgtagtctccctgtgtcagactgctctttcatagtataactttaaatcttttcttcaacttgagtctttgaagatagttttaattctgcttgtgacattaaaagattatttgggccagttatagcttattaggtgttgaagagaccaaggttgcaaggccaggccctgtgtgaacctttgagctttcatagagagtttcacagcatggactgtgtccccacggtcatccagtgttgtcatgcattggttagtcaaaatggggagggactagggcagtttggatagctcaacaagatacaatctcactctgtggtggtcctgctgacaaatcaagagcattgcttttgtttcttaagaaaacaaactcttttttaaaaattacttttaaatattaactcaaaagttgagattttggggtggtggtgtgccaagacattaattttttttttaaacaatgaagtgaaaaagttttacaatctctaggtttggctagttctcttaacactggttaaattaacattgcataaacacttttcaagtctgatccatatttaataatgctttaaaataaaaataaaaacaatccttttgataaatttaaaatgttacttattttaaaataaatgaagtgagatggcatggtgaggtgaaagtatcactggactaggaagaaggtgacttaggttctagataggtgtcttttaggactctgattttgaggacatcacttactatccatttcttcatgttaaaagaagtcatctcaaactcttagttttttttttttacaactatgtaatttatattccatttacataaggatacacttatttgtcaagctcagcacaatctgtaaatttttaacctatgttacaccatcttcagtgccagtcttgggcaaaattgtgcaagaggtgaagtttatatttgaatatccattctcgttttaggactcttcttccatattagtgtcatcttgcctccctaccttccacatgccccatgacttgatgcagttttaatacttgtaattcccctaaccataagatttactgctgctgtggatatctccatgaagttttcccactgagtcacatcagaaatgccctacatcttatttcctcagggctcaagagaatctgacagataccataaagggatttgacctaatcactaattttcaggtggtggctgatgctttgaacatctctttgctgcccaatccattagcgacagtaggatttttcaaacctggtatgaatagacagaaccctatccagtggaaggagaatttaataaagatagtgctgaaagaattccttaggtaatctataactaggactactcctggtaacagtaatacattccattgttttagtaaccagaaatcttcatgcaatgaaaaatactttaattcatgaagcttactttttttttttggtgtcagagtctcgctcttgtcacccaggctggaatgcagtggcgccatctcagctcactgcaacctccatctcccaggttcaagcgattctcgtgcctcggcctcctgagtagctgggattacaggcgtgtgccactacactcaactaatttttgtatttttaggagagacggggtttcaccctgttggccaggctggtctcgaactcctgacctcaagtgattcacccaccttggcctcataaacctgttttgcagaactcatttattcagcaaatatttattgagtgcctaccagatgccagtcaccgcacaaggcactgggtatatggtatccccaaacaagagacataatcccggtccttaggtagtgctagtgtggtctgtaatatcttactaaggcctttggtatacgacccagagataacacgatgcgtattttagttttgcaaagaaggggtttggtctctgtgccagctctataattgttttgctacgattccactgaaactcttcgatcaagctactttatgtaaatcacttcattgttttaaaggaataaacttgattatattgtttttttatttggcataactgtgattcttttaggacaattactgtacacattaaggtgtatgtcagatattcatattgacccaaatgtgtaatattccagttttctctgcataagtaattaaaatatacttaaaaattaatagttttatctgggtacaaataaacaggtgcctgaactagttcacagacaaggaaacttctatgtaaaaatcactatgatttctgaattgctatgtgaaactacagatctttggaacactgtttaggtagggtgttaagacttacacagtacctcgtttctacacagagaaagaaatggccatacttcaggaactgcagtgcttatgaggggatatttaggcctcttgaatttttgatgtagatgggcatttttttaaggtagtggttaattacctttatgtgaactttgaatggtttaacaaaagatttgtttttgtagagattttaaagggggagaattctagaaataaatgttacctaattattacagccttaaagacaaaaatccttgttgaagtttttttaaaaaaagctaaattacatagacttaggcattaacatgtttgtggaagaatatagcagacgtatattgtatcatttgagtgaatgttcccaagtaggcattctaggctctatttaactgagtcacactgcataggaatttagaacctaacttttataggttatcaaaactgttgtcaccattgcacaattttgtcctaatatatacatagaaactttgtggggcatgttaagttacagtttgcacaagttcatctcatttgtattccattgattttttttttcttctaaacattttttcttcaaacagtatataactttttttaggggatttttttttagacagcaaaaactatctgaagatttccatttgtcaaaaagtaatgatttcttgataattgtgtagtaatgttttttagaacccagcagttaccttaaagctgaatttatatttagtaacttctgtgttaatactggatagcatgaattctgcattgagaaactgaatagctgtcataaaatgaaactttctttctaaagaaagatactcacatgagttcttgaagaatagtcataactagattaagatctgtgttttagtttaatagtttgaagtgcctgtttgggataatgataggtaatttagatgaatttaggggaaaaaaaagttatctgcagatatgttgagggcccatctctccccccacacccccacagagctaactgggttacagtgttttatccgaaagtttccaattccactgtcttgtgttttcatgttgaaaatacttttgcatttttcctttgagtgccaatttcttactagtactatttcttaatgtaacatgtttacctggaatgtattttaactatttttgtatagtgtaaactgaaacatgcacattttgtacattgtgctttcttttgtgggacatatgcagtgtgatccagttgttttccatcatttggttgcgctgacctaggaatgttggtcatatcaaacattaaaaatgaccactcttttaattgaaattaacttttaaatgtttataggagtatgtgctgtgaagtgatctaaaatttgtaatatttttgtcatgaactgtactactcctaattattgtaatgtaataaaaatagttacagtgacaaaaaaaaaaaaaaa

SEQ ID NO: 54 - protein, 188 aa, Artificial sequence
  Synthetic Construct
MTEYKLVVVGAFGVGKSALTIQLIQNHFVDEYDPTIEDSYRKQVVIDGETCLLDILDTAGQEEYSAMRDQYMRTGEGFLCVFAINNTKSFEDIHHYREQIKRVKDSEDVPMVLVGNKCDLPSRTVDTKQAQDLARSYGIPFIETSAKTRQGVDDAFYTLVREIRKHKEKMSKDGKKKKKKSKTKCVIM

SEQ ID NO: 55 - DNA, 5312 bp, Artificial sequence
  /note="Description of Artificial Sequence: mutated Homo sapiens v-Ki-ras2 Kirsten rat sarcoma viral oncogene homolog (KRAS), transcript variant b, mutation KRAS_ G13C"
  CDS (182)..(748)
ggccgcggcggcggaggcagcagcggcggcggcagtggcggcggcgaaggtggcggcggctcggccagtactcccggcccccgccatttcggactgggagcgagcgcggcgcaggcactgaaggcggcggcggggccagaggctcagcggctcccaggtgcgggagagaggcctgctgaaaatgactgaatataaacttgtggtagttggagctggttgcgtaggcaagagtgccttgacgatacagctaattcagaatcattttgtggacgaatatgatccaacaatagaggattcctacaggaagcaagtagtaattgatggagaaacctgtctcttggatattctcgacacagcaggtcaagaggagtacagtgcaatgagggaccagtacatgaggactggggagggctttctttgtgtatttgccataaataatactaaatcatttgaagatattcaccattatagagaacaaattaaaagagttaaggactctgaagatgtacctatggtcctagtaggaaataaatgtgatttgccttctagaacagtagacacaaaacaggctcaggacttagcaagaagttatggaattccttttattgaaacatcagcaaagacaagacagggtgttgatgatgccttctatacattagttcgagaaattcgaaaacataaagaaaagatgagcaaagatggtaaaaagaagaaaaagaagtcaaagacaaagtgtgtaattatgtaaatacaatttgtacttttttcttaaggcatactagtacaagtggtaatttttgtacattacactaaattattagcatttgttttagcattacctaatttttttcctgctccatgcagactgttagcttttaccttaaatgcttattttaaaatgacagtggaagtttttttttcctctaagtgccagtattcccagagttttggtttttgaactagcaatgcctgtgaaaaagaaactgaatacctaagatttctgtcttggggtttttggtgcatgcagttgattacttcttatttttcttaccaattgtgaatgttggtgtgaaacaaattaatgaagcttttgaatcatccctattctgtgttttatctagtcacataaatggattaattactaatttcagttgagaccttctaattggtttttactgaaacattgagggaacacaaatttatgggcttcctgatgatgattcttctaggcatcatgtcctatagtttgtcatccctgatgaatgtaaagttacactgttcacaaaggttttgtctcctttccactgctattagtcatggtcactctccccaaaatattatattttttctataaaaagaaaaaaatggaaaaaaattacaaggcaatggaaactattataaggccatttccttttcacattagataaattactataaagactcctaatagcttttcctgttaaggcagacccagtatgaaatggggattattatagcaaccattttggggctatatttacatgctactaaatttttataataattgaaaagattttaacaagtataaaaaattctcataggaattaaatgtagtctccctgtgtcagactgctctttcatagtataactttaaatcttttcttcaacttgagtctttgaagatagttttaattctgcttgtgacattaaaagattatttgggccagttatagcttattaggtgttgaagagaccaaggttgcaaggccaggccctgtgtgaacctttgagctttcatagagagtttcacagcatggactgtgtccccacggtcatccagtgttgtcatgcattggttagtcaaaatggggagggactagggcagtttggatagctcaacaagatacaatctcactctgtggtggtcctgctgacaaatcaagagcattgcttttgtttcttaagaaaacaaactcttttttaaaaattacttttaaatattaactcaaaagttgagattttggggtggtggtgtgccaagacattaattttttttttaaacaatgaagtgaaaaagttttacaatctctaggtttggctagttctcttaacactggttaaattaacattgcataaacacttttcaagtctgatccatatttaataatgctttaaaataaaaataaaaacaatccttttgataaatttaaaatgttacttattttaaaataaatgaagtgagatggcatggtgaggtgaaagtatcactggactaggaagaaggtgacttaggttctagataggtgtcttttaggactctgattttgaggacatcacttactatccatttcttcatgttaaaagaagtcatctcaaactcttagttttttttttttacaactatgtaatttatattccatttacataaggatacacttatttgtcaagctcagcacaatctgtaaatttttaacctatgttacaccatcttcagtgccagtcttgggcaaaattgtgcaagaggtgaagtttatatttgaatatccattctcgttttaggactcttcttccatattagtgtcatcttgcctccctaccttccacatgccccatgacttgatgcagttttaatacttgtaattcccctaaccataagatttactgctgctgtggatatctccatgaagttttcccactgagtcacatcagaaatgccctacatcttatttcctcagggctcaagagaatctgacagataccataaagggatttgacctaatcactaattttcaggtggtggctgatgctttgaacatctctttgctgcccaatccattagcgacagtaggatttttcaaacctggtatgaatagacagaaccctatccagtggaaggagaatttaataaagatagtgctgaaagaattccttaggtaatctataactaggactactcctggtaacagtaatacattccattgttttagtaaccagaaatcttcatgcaatgaaaaatactttaattcatgaagcttactttttttttttggtgtcagagtctcgctcttgtcacccaggctggaatgcagtggcgccatctcagctcactgcaacctccatctcccaggttcaagcgattctcgtgcctcggcctcctgagtagctgggattacaggcgtgtgccactacactcaactaatttttgtatttttaggagagacggggtttcaccctgttggccaggctggtctcgaactcctgacctcaagtgattcacccaccttggcctcataaacctgttttgcagaactcatttattcagcaaatatttattgagtgcctaccagatgccagtcaccgcacaaggcactgggtatatggtatccccaaacaagagacataatcccggtccttaggtagtgctagtgtggtctgtaatatcttactaaggcctttggtatacgacccagagataacacgatgcgtattttagttttgcaaagaaggggtttggtctctgtgccagctctataattgttttgctacgattccactgaaactcttcgatcaagctactttatgtaaatcacttcattgttttaaaggaataaacttgattatattgtttttttatttggcataactgtgattcttttaggacaattactgtacacattaaggtgtatgtcagatattcatattgacccaaatgtgtaatattccagttttctctgcataagtaattaaaatatacttaaaaattaatagttttatctgggtacaaataaacaggtgcctgaactagttcacagacaaggaaacttctatgtaaaaatcactatgatttctgaattgctatgtgaaactacagatctttggaacactgtttaggtagggtgttaagacttacacagtacctcgtttctacacagagaaagaaatggccatacttcaggaactgcagtgcttatgaggggatatttaggcctcttgaatttttgatgtagatgggcatttttttaaggtagtggttaattacctttatgtgaactttgaatggtttaacaaaagatttgtttttgtagagattttaaagggggagaattctagaaataaatgttacctaattattacagccttaaagacaaaaatccttgttgaagtttttttaaaaaaagctaaattacatagacttaggcattaacatgtttgtggaagaatatagcagacgtatattgtatcatttgagtgaatgttcccaagtaggcattctaggctctatttaactgagtcacactgcataggaatttagaacctaacttttataggttatcaaaactgttgtcaccattgcacaattttgtcctaatatatacatagaaactttgtggggcatgttaagttacagtttgcacaagttcatctcatttgtattccattgattttttttttcttctaaacattttttcttcaaacagtatataactttttttaggggatttttttttagacagcaaaaactatctgaagatttccatttgtcaaaaagtaatgatttcttgataattgtgtagtaatgttttttagaacccagcagttaccttaaagctgaatttatatttagtaacttctgtgttaatactggatagcatgaattctgcattgagaaactgaatagctgtcataaaatgaaactttctttctaaagaaagatactcacatgagttcttgaagaatagtcataactagattaagatctgtgttttagtttaatagtttgaagtgcctgtttgggataatgataggtaatttagatgaatttaggggaaaaaaaagttatctgcagatatgttgagggcccatctctccccccacacccccacagagctaactgggttacagtgttttatccgaaagtttccaattccactgtcttgtgttttcatgttgaaaatacttttgcatttttcctttgagtgccaatttcttactagtactatttcttaatgtaacatgtttacctggaatgtattttaactatttttgtatagtgtaaactgaaacatgcacattttgtacattgtgctttcttttgtgggacatatgcagtgtgatccagttgttttccatcatttggttgcgctgacctaggaatgttggtcatatcaaacattaaaaatgaccactcttttaattgaaattaacttttaaatgtttataggagtatgtgctgtgaagtgatctaaaatttgtaatatttttgtcatgaactgtactactcctaattattgtaatgtaataaaaatagttacagtgacaaaaaaaaaaaaaaa

SEQ ID NO: 56 - protein, 188 aa, Artificial sequence
  Synthetic Construct
MTEYKLVVVGAGCVGKSALTIQLIQNHFVDEYDPTIEDSYRKQVVIDGETCLLDILDTAGQEEYSAMRDQYMRTGEGFLCVFAINNTKSFEDIHHYREQIKRVKDSEDVPMVLVGNKCDLPSRTVDTKQAQDLARSYGIPFIETSAKTRQGVDDAFYTLVREIRKHKEKMSKDGKKKKKKSKTKCVIM

SEQ ID NO: 57 - DNA, 5312 bp, Artificial sequence
  /note="Description of Artificial Sequence: mutated Homo sapiens v-Ki-ras2 Kirsten rat sarcoma viral oncogene homolog (KRAS), transcript variant b, mutation KRAS_ G13D"
  CDS (182)..(748)
ggccgcggcggcggaggcagcagcggcggcggcagtggcggcggcgaaggtggcggcggctcggccagtactcccggcccccgccatttcggactgggagcgagcgcggcgcaggcactgaaggcggcggcggggccagaggctcagcggctcccaggtgcgggagagaggcctgctgaaaatgactgaatataaacttgtggtagttggagctggtgacgtaggcaagagtgccttgacgatacagctaattcagaatcattttgtggacgaatatgatccaacaatagaggattcctacaggaagcaagtagtaattgatggagaaacctgtctcttggatattctcgacacagcaggtcaagaggagtacagtgcaatgagggaccagtacatgaggactggggagggctttctttgtgtatttgccataaataatactaaatcatttgaagatattcaccattatagagaacaaattaaaagagttaaggactctgaagatgtacctatggtcctagtaggaaataaatgtgatttgccttctagaacagtagacacaaaacaggctcaggacttagcaagaagttatggaattccttttattgaaacatcagcaaagacaagacagggtgttgatgatgccttctatacattagttcgagaaattcgaaaacataaagaaaagatgagcaaagatggtaaaaagaagaaaaagaagtcaaagacaaagtgtgtaattatgtaaatacaatttgtacttttttcttaaggcatactagtacaagtggtaatttttgtacattacactaaattattagcatttgttttagcattacctaatttttttcctgctccatgcagactgttagcttttaccttaaatgcttattttaaaatgacagtggaagtttttttttcctctaagtgccagtattcccagagttttggtttttgaactagcaatgcctgtgaaaaagaaactgaatacctaagatttctgtcttggggtttttggtgcatgcagttgattacttcttatttttcttaccaattgtgaatgttggtgtgaaacaaattaatgaagcttttgaatcatccctattctgtgttttatctagtcacataaatggattaattactaatttcagttgagaccttctaattggtttttactgaaacattgagggaacacaaatttatgggcttcctgatgatgattcttctaggcatcatgtcctatagtttgtcatccctgatgaatgtaaagttacactgttcacaaaggttttgtctcctttccactgctattagtcatggtcactctccccaaaatattatattttttctataaaaagaaaaaaatggaaaaaaattacaaggcaatggaaactattataaggccatttccttttcacattagataaattactataaagactcctaatagcttttcctgttaaggcagacccagtatgaaatggggattattatagcaaccattttggggctatatttacatgctactaaatttttataataattgaaaagattttaacaagtataaaaaattctcataggaattaaatgtagtctccctgtgtcagactgctctttcatagtataactttaaatcttttcttcaacttgagtctttgaagatagttttaattctgcttgtgacattaaaagattatttgggccagttatagcttattaggtgttgaagagaccaaggttgcaaggccaggccctgtgtgaacctttgagctttcatagagagtttcacagcatggactgtgtccccacggtcatccagtgttgtcatgcattggttagtcaaaatggggagggactagggcagtttggatagctcaacaagatacaatctcactctgtggtggtcctgctgacaaatcaagagcattgcttttgtttcttaagaaaacaaactcttttttaaaaattacttttaaatattaactcaaaagttgagattttggggtggtggtgtgccaagacattaattttttttttaaacaatgaagtgaaaaagttttacaatctctaggtttggctagttctcttaacactggttaaattaacattgcataaacacttttcaagtctgatccatatttaataatgctttaaaataaaaataaaaacaatccttttgataaatttaaaatgttacttattttaaaataaatgaagtgagatggcatggtgaggtgaaagtatcactggactaggaagaaggtgacttaggttctagataggtgtcttttaggactctgattttgaggacatcacttactatccatttcttcatgttaaaagaagtcatctcaaactcttagttttttttttttacaactatgtaatttatattccatttacataaggatacacttatttgtcaagctcagcacaatctgtaaatttttaacctatgttacaccatcttcagtgccagtcttgggcaaaattgtgcaagaggtgaagtttatatttgaatatccattctcgttttaggactcttcttccatattagtgtcatcttgcctccctaccttccacatgccccatgacttgatgcagttttaatacttgtaattcccctaaccataagatttactgctgctgtggatatctccatgaagttttcccactgagtcacatcagaaatgccctacatcttatttcctcagggctcaagagaatctgacagataccataaagggatttgacctaatcactaattttcaggtggtggctgatgctttgaacatctctttgctgcccaatccattagcgacagtaggatttttcaaacctggtatgaatagacagaaccctatccagtggaaggagaatttaataaagatagtgctgaaagaattccttaggtaatctataactaggactactcctggtaacagtaatacattccattgttttagtaaccagaaatcttcatgcaatgaaaaatactttaattcatgaagcttactttttttttttggtgtcagagtctcgctcttgtcacccaggctggaatgcagtggcgccatctcagctcactgcaacctccatctcccaggttcaagcgattctcgtgcctcggcctcctgagtagctgggattacaggcgtgtgccactacactcaactaatttttgtatttttaggagagacggggtttcaccctgttggccaggctggtctcgaactcctgacctcaagtgattcacccaccttggcctcataaacctgttttgcagaactcatttattcagcaaatatttattgagtgcctaccagatgccagtcaccgcacaaggcactgggtatatggtatccccaaacaagagacataatcccggtccttaggtagtgctagtgtggtctgtaatatcttactaaggcctttggtatacgacccagagataacacgatgcgtattttagttttgcaaagaaggggtttggtctctgtgccagctctataattgttttgctacgattccactgaaactcttcgatcaagctactttatgtaaatcacttcattgttttaaaggaataaacttgattatattgtttttttatttggcataactgtgattcttttaggacaattactgtacacattaaggtgtatgtcagatattcatattgacccaaatgtgtaatattccagttttctctgcataagtaattaaaatatacttaaaaattaatagttttatctgggtacaaataaacaggtgcctgaactagttcacagacaaggaaacttctatgtaaaaatcactatgatttctgaattgctatgtgaaactacagatctttggaacactgtttaggtagggtgttaagacttacacagtacctcgtttctacacagagaaagaaatggccatacttcaggaactgcagtgcttatgaggggatatttaggcctcttgaatttttgatgtagatgggcatttttttaaggtagtggttaattacctttatgtgaactttgaatggtttaacaaaagatttgtttttgtagagattttaaagggggagaattctagaaataaatgttacctaattattacagccttaaagacaaaaatccttgttgaagtttttttaaaaaaagctaaattacatagacttaggcattaacatgtttgtggaagaatatagcagacgtatattgtatcatttgagtgaatgttcccaagtaggcattctaggctctatttaactgagtcacactgcataggaatttagaacctaacttttataggttatcaaaactgttgtcaccattgcacaattttgtcctaatatatacatagaaactttgtggggcatgttaagttacagtttgcacaagttcatctcatttgtattccattgattttttttttcttctaaacattttttcttcaaacagtatataactttttttaggggatttttttttagacagcaaaaactatctgaagatttccatttgtcaaaaagtaatgatttcttgataattgtgtagtaatgttttttagaacccagcagttaccttaaagctgaatttatatttagtaacttctgtgttaatactggatagcatgaattctgcattgagaaactgaatagctgtcataaaatgaaactttctttctaaagaaagatactcacatgagttcttgaagaatagtcataactagattaagatctgtgttttagtttaatagtttgaagtgcctgtttgggataatgataggtaatttagatgaatttaggggaaaaaaaagttatctgcagatatgttgagggcccatctctccccccacacccccacagagctaactgggttacagtgttttatccgaaagtttccaattccactgtcttgtgttttcatgttgaaaatacttttgcatttttcctttgagtgccaatttcttactagtactatttcttaatgtaacatgtttacctggaatgtattttaactatttttgtatagtgtaaactgaaacatgcacattttgtacattgtgctttcttttgtgggacatatgcagtgtgatccagttgttttccatcatttggttgcgctgacctaggaatgttggtcatatcaaacattaaaaatgaccactcttttaattgaaattaacttttaaatgtttataggagtatgtgctgtgaagtgatctaaaatttgtaatatttttgtcatgaactgtactactcctaattattgtaatgtaataaaaatagttacagtgacaaaaaaaaaaaaaaa

SEQ ID NO: 58 - protein, 188 aa, Artificial sequence [sequence omitted]

SEQ ID NO: 59 - DNA, 5312 bp, Artificial sequence
  /note="Description of Artificial Sequence: mutated Homo sapiens v-Ki-ras2 Kirsten rat sarcoma viral oncogene homolog (KRAS), transcript variant b, mutation KRAS_ G13S"
  CDS (182)..(748)
ggccgcggcggcggaggcagcagcggcggcggcagtggcggcggcgaaggtggcggcggctcggccagtactcccggcccccgccatttcggactgggagcgagcgcggcgcaggcactgaaggcggcggcggggccagaggctcagcggctcccaggtgcgggagagaggcctgctgaaaatgactgaatataaacttgtggtagttggagctggtagcgtaggcaagagtgccttgacgatacagctaattcagaatcattttgtggacgaatatgatccaacaatagaggattcctacaggaagcaagtagtaattgatggagaaacctgtctcttggatattctcgacacagcaggtcaagaggagtacagtgcaatgagggaccagtacatgaggactggggagggctttctttgtgtatttgccataaataatactaaatcatttgaagatattcaccattatagagaacaaattaaaagagttaaggactctgaagatgtacctatggtcctagtaggaaataaatgtgatttgccttctagaacagtagacacaaaacaggctcaggacttagcaagaagttatggaattccttttattgaaacatcagcaaagacaagacagggtgttgatgatgccttctatacattagttcgagaaattcgaaaacataaagaaaagatgagcaaagatggtaaaaagaagaaaaagaagtcaaagacaaagtgtgtaattatgtaaatacaatttgtacttttttcttaaggcatactagtacaagtggtaatttttgtacattacactaaattattagcatttgttttagcattacctaatttttttcctgctccatgcagactgttagcttttaccttaaatgcttattttaaaatgacagtggaagtttttttttcctctaagtgccagtattcccagagttttggtttttgaactagcaatgcctgtgaaaaagaaactgaatacctaagatttctgtcttggggtttttggtgcatgcagttgattacttcttatttttcttaccaattgtgaatgttggtgtgaaacaaattaatgaagcttttgaatcatccctattctgtgttttatctagtcacataaatggattaattactaatttcagttgagaccttctaattggtttttactgaaacattgagggaacacaaatttatgggcttcctgatgatgattcttctaggcatcatgtcctatagtttgtcatccctgatgaatgtaaagttacactgttcacaaaggttttgtctcctttccactgctattagtcatggtcactctccccaaaatattatattttttctataaaaagaaaaaaatggaaaaaaattacaaggcaatggaaactattataaggccatttccttttcacattagataaattactataaagactcctaatagcttttcctgttaaggcagacccagtatgaaatggggattattatagcaaccattttggggctatatttacatgctactaaatttttataataattgaaaagattttaacaagtataaaaaattctcataggaattaaatgtagtctccctgtgtcagactgctctttcatagtataactttaaatcttttcttcaacttgagtctttgaagatagttttaattctgcttgtgacattaaaagattatttgggccagttatagcttattaggtgttgaagagaccaaggttgcaaggccaggccctgtgtgaacctttgagctttcatagagagtttcacagcatggactgtgtccccacggtcatccagtgttgtcatgcattggttagtcaaaatggggagggactagggcagtttggatagctcaacaagatacaatctcactctgtggtggtcctgctgacaaatcaagagcattgcttttgtttcttaagaaaacaaactcttttttaaaaattacttttaaatattaactcaaaagttgagattttggggtggtggtgtgccaagacattaattttttttttaaacaatgaagtgaaaaagttttacaatctctaggtttggctagttctcttaacactggttaaattaacattgcataaacacttttcaagtctgatccatatttaataatgctttaaaataaaaataaaaacaatccttttgataaatttaaaatgttacttattttaaaataaatgaagtgagatggcatggtgaggtgaaagtatcactggactaggaagaaggtgacttaggttctagataggtgtcttttaggactctgattttgaggacatcacttactatccatttcttcatgttaaaagaagtcatctcaaactcttagttttttttttttacaactatgtaatttatattccatttacataaggatacacttatttgtcaagctcagcacaatctgtaaatttttaacctatgttacaccatcttcagtgccagtcttgggcaaaattgtgcaagaggtgaagtttatatttgaatatccattctcgttttaggactcttcttccatattagtgtcatcttgcctccctaccttccacatgccccatgacttgatgcagttttaatacttgtaattcccctaaccataagatttactgctgctgtggatatctccatgaagttttcccactgagtcacatcagaaatgccctacatcttatttcctcagggctcaagagaatctgacagataccataaagggatttgacctaatcactaattttcaggtggtggctgatgctttgaacatctctttgctgcccaatccattagcgacagtaggatttttcaaacctggtatgaatagacagaaccctatccagtggaaggagaatttaataaagatagtgctgaaagaattccttaggtaatctataactaggactactcctggtaacagtaatacattccattgttttagtaaccagaaatcttcatgcaatgaaaaatactttaattcatgaagcttactttttttttttggtgtcagagtctcgctcttgtcacccaggctggaatgcagtggcgccatctcagctcactgcaacctccatctcccaggttcaagcgattctcgtgcctcggcctcctgagtagctgggattacaggcgtgtgccactacactcaactaatttttgtatttttaggagagacggggtttcaccctgttggccaggctggtctcgaactcctgacctcaagtgattcacccaccttggcctcataaacctgttttgcagaactcatttattcagcaaatatttattgagtgcctaccagatgccagtcaccgcacaaggcactgggtatatggtatccccaaacaagagacataatcccggtccttaggtagtgctagtgtggtctgtaatatcttactaaggcctttggtatacgacccagagataacacgatgcgtattttagttttgcaaagaaggggtttggtctctgtgccagctctataattgttttgctacgattccactgaaactcttcgatcaagctactttatgtaaatcacttcattgttttaaaggaataaacttgattatattgtttttttatttggcataactgtgattcttttaggacaattactgtacacattaaggtgtatgtcagatattcatattgacccaaatgtgtaatattccagttttctctgcataagtaattaaaatatacttaaaaattaatagttttatctgggtacaaataaacaggtgcctgaactagttcacagacaaggaaacttctatgtaaaaatcactatgatttctgaattgctatgtgaaactacagatctttggaacactgtttaggtagggtgttaagacttacacagtacctcgtttctacacagagaaagaaatggccatacttcaggaactgcagtgcttatgaggggatatttaggcctcttgaatttttgatgtagatgggcatttttttaaggtagtggttaattacctttatgtgaactttgaatggtttaacaaaagatttgtttttgtagagattttaaagggggagaattctagaaataaatgttacctaattattacagccttaaagacaaaaatccttgttgaagtttttttaaaaaaagctaaattacatagacttaggcattaacatgtttgtggaagaatatagcagacgtatattgtatcatttgagtgaatgttcccaagtaggcattctaggctctatttaactgagtcacactgcataggaatttagaacctaacttttataggttatcaaaactgttgtcaccattgcacaattttgtcctaatatatacatagaaactttgtggggcatgttaagttacagtttgcacaagttcatctcatttgtattccattgattttttttttcttctaaacattttttcttcaaacagtatataactttttttaggggatttttttttagacagcaaaaactatctgaagatttccatttgtcaaaaagtaatgatttcttgataattgtgtagtaatgttttttagaacccagcagttaccttaaagctgaatttatatttagtaacttctgtgttaatactggatagcatgaattctgcattgagaaactgaatagctgtcataaaatgaaactttctttctaaagaaagatactcacatgagttcttgaagaatagtcataactagattaagatctgtgttttagtttaatagtttgaagtgcctgtttgggataatgataggtaatttagatgaatttaggggaaaaaaaagttatctgcagatatgttgagggcccatctctccccccacacccccacagagctaactgggttacagtgttttatccgaaagtttccaattccactgtcttgtgttttcatgttgaaaatacttttgcatttttcctttgagtgccaatttcttactagtactatttcttaatgtaacatgtttacctggaatgtattttaactatttttgtatagtgtaaactgaaacatgcacattttgtacattgtgctttcttttgtgggacatatgcagtgtgatccagttgttttccatcatttggttgcgctgacctaggaatgttggtcatatcaaacattaaaaatgaccactcttttaattgaaattaacttttaaatgtttataggagtatgtgctgtgaagtgatctaaaatttgtaatatttttgtcatgaactgtactactcctaattattgtaatgtaataaaaatagttacagtgacaaaaaaaaaaaaaaa

SEQ ID NO: 60 - protein, 188 aa, Artificial sequence
  Synthetic Construct
MTEYKLVVVGAGSVGKSALTIQLIQNHFVDEYDPTIEDSYRKQVVIDGETCLLDILDTAGQEEYSAMRDQYMRTGEGFLCVFAINNTKSFEDIHHYREQIKRVKDSEDVPMVLVGNKCDLPSRTVDTKQAQDLARSYGIPFIETSAKTRQGVDDAFYTLVREIRKHKEKMSKDGKKKKKKSKTKCVIM

SEQ ID NO: 61 - DNA, 5312 bp, Artificial sequence
  /note="Description of Artificial Sequence: mutated Homo sapiens v-Ki-ras2 Kirsten rat sarcoma viral oncogene homolog (KRAS), transcript variant b, mutation KRAS_ G13V"
  CDS (182)..(748)
ggccgcggcggcggaggcagcagcggcggcggcagtggcggcggcgaaggtggcggcggctcggccagtactcccggcccccgccatttcggactgggagcgagcgcggcgcaggcactgaaggcggcggcggggccagaggctcagcggctcccaggtgcgggagagaggcctgctgaaaatgactgaatataaacttgtggtagttggagctggtgtcgtaggcaagagtgccttgacgatacagctaattcagaatcattttgtggacgaatatgatccaacaatagaggattcctacaggaagcaagtagtaattgatggagaaacctgtctcttggatattctcgacacagcaggtcaagaggagtacagtgcaatgagggaccagtacatgaggactggggagggctttctttgtgtatttgccataaataatactaaatcatttgaagatattcaccattatagagaacaaattaaaagagttaaggactctgaagatgtacctatggtcctagtaggaaataaatgtgatttgccttctagaacagtagacacaaaacaggctcaggacttagcaagaagttatggaattccttttattgaaacatcagcaaagacaagacagggtgttgatgatgccttctatacattagttcgagaaattcgaaaacataaagaaaagatgagcaaagatggtaaaaagaagaaaaagaagtcaaagacaaagtgtgtaattatgtaaatacaatttgtacttttttcttaaggcatactagtacaagtggtaatttttgtacattacactaaattattagcatttgttttagcattacctaatttttttcctgctccatgcagactgttagcttttaccttaaatgcttattttaaaatgacagtggaagtttttttttcctctaagtgccagtattcccagagttttggtttttgaactagcaatgcctgtgaaaaagaaactgaatacctaagatttctgtcttggggtttttggtgcatgcagttgattacttcttatttttcttaccaattgtgaatgttggtgtgaaacaaattaatgaagcttttgaatcatccctattctgtgttttatctagtcacataaatggattaattactaatttcagttgagaccttctaattggtttttactgaaacattgagggaacacaaatttatgggcttcctgatgatgattcttctaggcatcatgtcctatagtttgtcatccctgatgaatgtaaagttacactgttcacaaaggttttgtctcctttccactgctattagtcatggtcactctccccaaaatattatattttttctataaaaagaaaaaaatggaaaaaaattacaaggcaatggaaactattataaggccatttccttttcacattagataaattactataaagactcctaatagcttttcctgttaaggcagacccagtatgaaatggggattattatagcaaccattttggggctatatttacatgctactaaatttttataataattgaaaagattttaacaagtataaaaaattctcataggaattaaatgtagtctccctgtgtcagactgctctttcatagtataactttaaatcttttcttcaacttgagtctttgaagatagttttaattctgcttgtgacattaaaagattatttgggccagttatagcttattaggtgttgaagagaccaaggttgcaaggccaggccctgtgtgaacctttgagctttcatagagagtttcacagcatggactgtgtccccacggtcatccagtgttgtcatgcattggttagtcaaaatggggagggactagggcagtttggatagctcaacaagatacaatctcactctgtggtggtcctgctgacaaatcaagagcattgcttttgtttcttaagaaaacaaactcttttttaaaaattacttttaaatattaactcaaaagttgagattttggggtggtggtgtgccaagacattaattttttttttaaacaatgaagtgaaaaagttttacaatctctaggtttggctagttctcttaacactggttaaattaacattgcataaacacttttcaagtctgatccatatttaataatgctttaaaataaaaataaaaacaatccttttgataaatttaaaatgttacttattttaaaataaatgaagtgagatggcatggtgaggtgaaagtatcactggactaggaagaaggtgacttaggttctagataggtgtcttttaggactctgattttgaggacatcacttactatccatttcttcatgttaaaagaagtcatctcaaactcttagttttttttttttacaactatgtaatttatattccatttacataaggatacacttatttgtcaagctcagcacaatctgtaaatttttaacctatgttacaccatcttcagtgccagtcttgggcaaaattgtgcaagaggtgaagtttatatttgaatatccattctcgttttaggactcttcttccatattagtgtcatcttgcctccctaccttccacatgccccatgacttgatgcagttttaatacttgtaattcccctaaccataagatttactgctgctgtggatatctccatgaagttttcccactgagtcacatcagaaatgccctacatcttatttcctcagggctcaagagaatctgacagataccataaagggatttgacctaatcactaattttcaggtggtggctgatgctttgaacatctctttgctgcccaatccattagcgacagtaggatttttcaaacctggtatgaatagacagaaccctatccagtggaaggagaatttaataaagatagtgctgaaagaattccttaggtaatctataactaggactactcctggtaacagtaatacattccattgttttagtaaccagaaatcttcatgcaatgaaaaatactttaattcatgaagcttactttttttttttggtgtcagagtctcgctcttgtcacccaggctggaatgcagtggcgccatctcagctcactgcaacctccatctcccaggttcaagcgattctcgtgcctcggcctcctgagtagctgggattacaggcgtgtgccactacactcaactaatttttgtatttttaggagagacggggtttcaccctgttggccaggctggtctcgaactcctgacctcaagtgattcacccaccttggcctcataaacctgttttgcagaactcatttattcagcaaatatttattgagtgcctaccagatgccagtcaccgcacaaggcactgggtatatggtatccccaaacaagagacataatcccggtccttaggtagtgctagtgtggtctgtaatatcttactaaggcctttggtatacgacccagagataacacgatgcgtattttagttttgcaaagaaggggtttggtctctgtgccagctctataattgttttgctacgattccactgaaactcttcgatcaagctactttatgtaaatcacttcattgttttaaaggaataaacttgattatattgtttttttatttggcataactgtgattcttttaggacaattactgtacacattaaggtgtatgtcagatattcatattgacccaaatgtgtaatattccagttttctctgcataagtaattaaaatatacttaaaaattaatagttttatctgggtacaaataaacaggtgcctgaactagttcacagacaaggaaacttctatgtaaaaatcactatgatttctgaattgctatgtgaaactacagatctttggaacactgtttaggtagggtgttaagacttacacagtacctcgtttctacacagagaaagaaatggccatacttcaggaactgcagtgcttatgaggggatatttaggcctcttgaatttttgatgtagatgggcatttttttaaggtagtggttaattacctttatgtgaactttgaatggtttaacaaaagatttgtttttgtagagattttaaagggggagaattctagaaataaatgttacctaattattacagccttaaagacaaaaatccttgttgaagtttttttaaaaaaagctaaattacatagacttaggcattaacatgtttgtggaagaatatagcagacgtatattgtatcatttgagtgaatgttcccaagtaggcattctaggctctatttaactgagtcacactgcataggaatttagaacctaacttttataggttatcaaaactgttgtcaccattgcacaattttgtcctaatatatacatagaaactttgtggggcatgttaagttacagtttgcacaagttcatctcatttgtattccattgattttttttttcttctaaacattttttcttcaaacagtatataactttttttaggggatttttttttagacagcaaaaactatctgaagatttccatttgtcaaaaagtaatgatttcttgataattgtgtagtaatgttttttagaacccagcagttaccttaaagctgaatttatatttagtaacttctgtgttaatactggatagcatgaattctgcattgagaaactgaatagctgtcataaaatgaaactttctttctaaagaaagatactcacatgagttcttgaagaatagtcataactagattaagatctgtgttttagtttaatagtttgaagtgcctgtttgggataatgataggtaatttagatgaatttaggggaaaaaaaagttatctgcagatatgttgagggcccatctctccccccacacccccacagagctaactgggttacagtgttttatccgaaagtttccaattccactgtcttgtgttttcatgttgaaaatacttttgcatttttcctttgagtgccaatttcttactagtactatttcttaatgtaacatgtttacctggaatgtattttaactatttttgtatagtgtaaactgaaacatgcacattttgtacattgtgctttcttttgtgggacatatgcagtgtgatccagttgttttccatcatttggttgcgctgacctaggaatgttggtcatatcaaacattaaaaatgaccactcttttaattgaaattaacttttaaatgtttataggagtatgtgctgtgaagtgatctaaaatttgtaatatttttgtcatgaactgtactactcctaattattgtaatgtaataaaaatagttacagtgacaaaaaaaaaaaaaaa

SEQ ID NO: 62 - protein, 188 aa, Artificial sequence
  Synthetic Construct
MTEYKLVVVGAGVVGKSALTIQLIQNHFVDEYDPTIEDSYRKQVVIDGETCLLDILDTAGQEEYSAMRDQYMRTGEGFLCVFAINNTKSFEDIHHYREQIKRVKDSEDVPMVLVGNKCDLPSRTVDTKQAQDLARSYGIPFIETSAKTRQGVDDAFYTLVREIRKHKEKMSKDGKKKKKKSKTKCVIM

SEQ ID NO: 63 - DNA, 5312 bp, Artificial sequence
  /note="Description of Artificial Sequence: mutated Homo sapiens v-Ki-ras2 Kirsten rat sarcoma viral oncogene homolog (KRAS), transcript variant b, mutation KRAS_ A59T"
  CDS (182)..(748)
ggccgcggcggcggaggcagcagcggcggcggcagtggcggcggcgaaggtggcggcggctcggccagtactcccggcccccgccatttcggactgggagcgagcgcggcgcaggcactgaaggcggcggcggggccagaggctcagcggctcccaggtgcgggagagaggcctgctgaaaatgactgaatataaacttgtggtagttggagctggtggcgtaggcaagagtgccttgacgatacagctaattcagaatcattttgtggacgaatatgatccaacaatagaggattcctacaggaagcaagtagtaattgatggagaaacctgtctcttggatattctcgacacaacaggtcaagaggagtacagtgcaatgagggaccagtacatgaggactggggagggctttctttgtgtatttgccataaataatactaaatcatttgaagatattcaccattatagagaacaaattaaaagagttaaggactctgaagatgtacctatggtcctagtaggaaataaatgtgatttgccttctagaacagtagacacaaaacaggctcaggacttagcaagaagttatggaattccttttattgaaacatcagcaaagacaagacagggtgttgatgatgccttctatacattagttcgagaaattcgaaaacataaagaaaagatgagcaaagatggtaaaaagaagaaaaagaagtcaaagacaaagtgtgtaattatgtaaatacaatttgtacttttttcttaaggcatactagtacaagtggtaatttttgtacattacactaaattattagcatttgttttagcattacctaatttttttcctgctccatgcagactgttagcttttaccttaaatgcttattttaaaatgacagtggaagtttttttttcctctaagtgccagtattcccagagttttggtttttgaactagcaatgcctgtgaaaaagaaactgaatacctaagatttctgtcttggggtttttggtgcatgcagttgattacttcttatttttcttaccaattgtgaatgttggtgtgaaacaaattaatgaagcttttgaatcatccctattctgtgttttatctagtcacataaatggattaattactaatttcagttgagaccttctaattggtttttactgaaacattgagggaacacaaatttatgggcttcctgatgatgattcttctaggcatcatgtcctatagtttgtcatccctgatgaatgtaaagttacactgttcacaaaggttttgtctcctttccactgctattagtcatggtcactctccccaaaatattatattttttctataaaaagaaaaaaatggaaaaaaattacaaggcaatggaaactattataaggccatttccttttcacattagataaattactataaagactcctaatagcttttcctgttaaggcagacccagtatgaaatggggattattatagcaaccattttggggctatatttacatgctactaaatttttataataattgaaaagattttaacaagtataaaaaattctcataggaattaaatgtagtctccctgtgtcagactgctctttcatagtataactttaaatcttttcttcaacttgagtctttgaagatagttttaattctgcttgtgacattaaaagattatttgggccagttatagcttattaggtgttgaagagaccaaggttgcaaggccaggccctgtgtgaacctttgagctttcatagagagtttcacagcatggactgtgtccccacggtcatccagtgttgtcatgcattggttagtcaaaatggggagggactagggcagtttggatagctcaacaagatacaatctcactctgtggtggtcctgctgacaaatcaagagcattgcttttgtttcttaagaaaacaaactcttttttaaaaattacttttaaatattaactcaaaagttgagattttggggtggtggtgtgccaagacattaattttttttttaaacaatgaagtgaaaaagttttacaatctctaggtttggctagttctcttaacactggttaaattaacattgcataaacacttttcaagtctgatccatatttaataatgctttaaaataaaaataaaaacaatccttttgataaatttaaaatgttacttattttaaaataaatgaagtgagatggcatggtgaggtgaaagtatcactggactaggaagaaggtgacttaggttctagataggtgtcttttaggactctgattttgaggacatcacttactatccatttcttcatgttaaaagaagtcatctcaaactcttagttttttttttttacaactatgtaatttatattccatttacataaggatacacttatttgtcaagctcagcacaatctgtaaatttttaacctatgttacaccatcttcagtgccagtcttgggcaaaattgtgcaagaggtgaagtttatatttgaatatccattctcgttttaggactcttcttccatattagtgtcatcttgcctccctaccttccacatgccccatgacttgatgcagttttaatacttgtaattcccctaaccataagatttactgctgctgtggatatctccatgaagttttcccactgagtcacatcagaaatgccctacatcttatttcctcagggctcaagagaatctgacagataccataaagggatttgacctaatcactaattttcaggtggtggctgatgctttgaacatctctttgctgcccaatccattagcgacagtaggatttttcaaacctggtatgaatagacagaaccctatccagtggaaggagaatttaataaagatagtgctgaaagaattccttaggtaatctataactaggactactcctggtaacagtaatacattccattgttttagtaaccagaaatcttcatgcaatgaaaaatactttaattcatgaagcttactttttttttttggtgtcagagtctcgctcttgtcacccaggctggaatgcagtggcgccatctcagctcactgcaacctccatctcccaggttcaagcgattctcgtgcctcggcctcctgagtagctgggattacaggcgtgtgccactacactcaactaatttttgtatttttaggagagacggggtttcaccctgttggccaggctggtctcgaactcctgacctcaagtgattcacccaccttggcctcataaacctgttttgcagaactcatttattcagcaaatatttattgagtgcctaccagatgccagtcaccgcacaaggcactgggtatatggtatccccaaacaagagacataatcccggtccttaggtagtgctagtgtggtctgtaatatcttactaaggcctttggtatacgacccagagataacacgatgcgtattttagttttgcaaagaaggggtttggtctctgtgccagctctataattgttttgctacgattccactgaaactcttcgatcaagctactttatgtaaatcacttcattgttttaaaggaataaacttgattatattgtttttttatttggcataactgtgattcttttaggacaattactgtacacattaaggtgtatgtcagatattcatattgacccaaatgtgtaatattccagttttctctgcataagtaattaaaatatacttaaaaattaatagttttatctgggtacaaataaacaggtgcctgaactagttcacagacaaggaaacttctatgtaaaaatcactatgatttctgaattgctatgtgaaactacagatctttggaacactgtttaggtagggtgttaagacttacacagtacctcgtttctacacagagaaagaaatggccatacttcaggaactgcagtgcttatgaggggatatttaggcctcttgaatttttgatgtagatgggcatttttttaaggtagtggttaattacctttatgtgaactttgaatggtttaacaaaagatttgtttttgtagagattttaaagggggagaattctagaaataaatgttacctaattattacagccttaaagacaaaaatccttgttgaagtttttttaaaaaaagctaaattacatagacttaggcattaacatgtttgtggaagaatatagcagacgtatattgtatcatttgagtgaatgttcccaagtaggcattctaggctctatttaactgagtcacactgcataggaatttagaacctaacttttataggttatcaaaactgttgtcaccattgcacaattttgtcctaatatatacatagaaactttgtggggcatgttaagttacagtttgcacaagttcatctcatttgtattccattgattttttttttcttctaaacattttttcttcaaacagtatataactttttttaggggatttttttttagacagcaaaaactatctgaagatttccatttgtcaaaaagtaatgatttcttgataattgtgtagtaatgttttttagaacccagcagttaccttaaagctgaatttatatttagtaacttctgtgttaatactggatagcatgaattctgcattgagaaactgaatagctgtcataaaatgaaactttctttctaaagaaagatactcacatgagttcttgaagaatagtcataactagattaagatctgtgttttagtttaatagtttgaagtgcctgtttgggataatgataggtaatttagatgaatttaggggaaaaaaaagttatctgcagatatgttgagggcccatctctccccccacacccccacagagctaactgggttacagtgttttatccgaaagtttccaattccactgtcttgtgttttcatgttgaaaatacttttgcatttttcctttgagtgccaatttcttactagtactatttcttaatgtaacatgtttacctggaatgtattttaactatttttgtatagtgtaaactgaaacatgcacattttgtacattgtgctttcttttgtgggacatatgcagtgtgatccagttgttttccatcatttggttgcgctgacctaggaatgttggtcatatcaaacattaaaaatgaccactcttttaattgaaattaacttttaaatgtttataggagtatgtgctgtgaagtgatctaaaatttgtaatatttttgtcatgaactgtactactcctaattattgtaatgtaataaaaatagttacagtgacaaaaaaaaaaaaaaa

SEQ ID NO: 64 - protein, 188 aa, Artificial sequence
  Synthetic Construct
MTEYKLVVVGAGGVGKSALTIQLIQNHFVDEYDPTIEDSYRKQVVIDGETCLLDILDTTGQEEYSAMRDQYMRTGEGFLCVFAINNTKSFEDIHHYREQIKRVKDSEDVPMVLVGNKCDLPSRTVDTKQAQDLARSYGIPFIETSAKTRQGVDDAFYTLVREIRKHKEKMSKDGKKKKKKSKTKCVIM

SEQ ID NO: 65 - DNA, 5312 bp, Artificial sequence
  /note="Description of Artificial Sequence: mutated Homo sapiens v-Ki-ras2 Kirsten rat sarcoma viral oncogene homolog (KRAS), transcript variant b, mutation KRAS_ Q61E"
  CDS (182)..(748)
ggccgcggcggcggaggcagcagcggcggcggcagtggcggcggcgaaggtggcggcggctcggccagtactcccggcccccgccatttcggactgggagcgagcgcggcgcaggcactgaaggcggcggcggggccagaggctcagcggctcccaggtgcgggagagaggcctgctgaaaatgactgaatataaacttgtggtagttggagctggtggcgtaggcaagagtgccttgacgatacagctaattcagaatcattttgtggacgaatatgatccaacaatagaggattcctacaggaagcaagtagtaattgatggagaaacctgtctcttggatattctcgacacagcaggtgaagaggagtacagtgcaatgagggaccagtacatgaggactggggagggctttctttgtgtatttgccataaataatactaaatcatttgaagatattcaccattatagagaacaaattaaaagagttaaggactctgaagatgtacctatggtcctagtaggaaataaatgtgatttgccttctagaacagtagacacaaaacaggctcaggacttagcaagaagttatggaattccttttattgaaacatcagcaaagacaagacagggtgttgatgatgccttctatacattagttcgagaaattcgaaaacataaagaaaagatgagcaaagatggtaaaaagaagaaaaagaagtcaaagacaaagtgtgtaattatgtaaatacaatttgtacttttttcttaaggcatactagtacaagtggtaatttttgtacattacactaaattattagcatttgttttagcattacctaatttttttcctgctccatgcagactgttagcttttaccttaaatgcttattttaaaatgacagtggaagtttttttttcctctaagtgccagtattcccagagttttggtttttgaactagcaatgcctgtgaaaaagaaactgaatacctaagatttctgtcttggggtttttggtgcatgcagttgattacttcttatttttcttaccaattgtgaatgttggtgtgaaacaaattaatgaagcttttgaatcatccctattctgtgttttatctagtcacataaatggattaattactaatttcagttgagaccttctaattggtttttactgaaacattgagggaacacaaatttatgggcttcctgatgatgattcttctaggcatcatgtcctatagtttgtcatccctgatgaatgtaaagttacactgttcacaaaggttttgtctcctttccactgctattagtcatggtcactctccccaaaatattatattttttctataaaaagaaaaaaatggaaaaaaattacaaggcaatggaaactattataaggccatttccttttcacattagataaattactataaagactcctaatagcttttcctgttaaggcagacccagtatgaaatggggattattatagcaaccattttggggctatatttacatgctactaaatttttataataattgaaaagattttaacaagtataaaaaattctcataggaattaaatgtagtctccctgtgtcagactgctctttcatagtataactttaaatcttttcttcaacttgagtctttgaagatagttttaattctgcttgtgacattaaaagattatttgggccagttatagcttattaggtgttgaagagaccaaggttgcaaggccaggccctgtgtgaacctttgagctttcatagagagtttcacagcatggactgtgtccccacggtcatccagtgttgtcatgcattggttagtcaaaatggggagggactagggcagtttggatagctcaacaagatacaatctcactctgtggtggtcctgctgacaaatcaagagcattgcttttgtttcttaagaaaacaaactcttttttaaaaattacttttaaatattaactcaaaagttgagattttggggtggtggtgtgccaagacattaattttttttttaaacaatgaagtgaaaaagttttacaatctctaggtttggctagttctcttaacactggttaaattaacattgcataaacacttttcaagtctgatccatatttaataatgctttaaaataaaaataaaaacaatccttttgataaatttaaaatgttacttattttaaaataaatgaagtgagatggcatggtgaggtgaaagtatcactggactaggaagaaggtgacttaggttctagataggtgtcttttaggactctgattttgaggacatcacttactatccatttcttcatgttaaaagaagtcatctcaaactcttagttttttttttttacaactatgtaatttatattccatttacataaggatacacttatttgtcaagctcagcacaatctgtaaatttttaacctatgttacaccatcttcagtgccagtcttgggcaaaattgtgcaagaggtgaagtttatatttgaatatccattctcgttttaggactcttcttccatattagtgtcatcttgcctccctaccttccacatgccccatgacttgatgcagttttaatacttgtaattcccctaaccataagatttactgctgctgtggatatctccatgaagttttcccactgagtcacatcagaaatgccctacatcttatttcctcagggctcaagagaatctgacagataccataaagggatttgacctaatcactaattttcaggtggtggctgatgctttgaacatctctttgctgcccaatccattagcgacagtaggatttttcaaacctggtatgaatagacagaaccctatccagtggaaggagaatttaataaagatagtgctgaaagaattccttaggtaatctataactaggactactcctggtaacagtaatacattccattgttttagtaaccagaaatcttcatgcaatgaaaaatactttaattcatgaagcttactttttttttttggtgtcagagtctcgctcttgtcacccaggctggaatgcagtggcgccatctcagctcactgcaacctccatctcccaggttcaagcgattctcgtgcctcggcctcctgagtagctgggattacaggcgtgtgccactacactcaactaatttttgtatttttaggagagacggggtttcaccctgttggccaggctggtctcgaactcctgacctcaagtgattcacccaccttggcctcataaacctgttttgcagaactcatttattcagcaaatatttattgagtgcctaccagatgccagtcaccgcacaaggcactgggtatatggtatccccaaacaagagacataatcccggtccttaggtagtgctagtgtggtctgtaatatcttactaaggcctttggtatacgacccagagataacacgatgcgtattttagttttgcaaagaaggggtttggtctctgtgccagctctataattgttttgctacgattccactgaaactcttcgatcaagctactttatgtaaatcacttcattgttttaaaggaataaacttgattatattgtttttttatttggcataactgtgattcttttaggacaattactgtacacattaaggtgtatgtcagatattcatattgacccaaatgtgtaatattccagttttctctgcataagtaattaaaatatacttaaaaattaatagttttatctgggtacaaataaacaggtgcctgaactagttcacagacaaggaaacttctatgtaaaaatcactatgatttctgaattgctatgtgaaactacagatctttggaacactgtttaggtagggtgttaagacttacacagtacctcgtttctacacagagaaagaaatggccatacttcaggaactgcagtgcttatgaggggatatttaggcctcttgaatttttgatgtagatgggcatttttttaaggtagtggttaattacctttatgtgaactttgaatggtttaacaaaagatttgtttttgtagagattttaaagggggagaattctagaaataaatgttacctaattattacagccttaaagacaaaaatccttgttgaagtttttttaaaaaaagctaaattacatagacttaggcattaacatgtttgtggaagaatatagcagacgtatattgtatcatttgagtgaatgttcccaagtaggcattctaggctctatttaactgagtcacactgcataggaatttagaacctaacttttataggttatcaaaactgttgtcaccattgcacaattttgtcctaatatatacatagaaactttgtggggcatgttaagttacagtttgcacaagttcatctcatttgtattccattgattttttttttcttctaaacattttttcttcaaacagtatataactttttttaggggatttttttttagacagcaaaaactatctgaagatttccatttgtcaaaaagtaatgatttcttgataattgtgtagtaatgttttttagaacccagcagttaccttaaagctgaatttatatttagtaacttctgtgttaatactggatagcatgaattctgcattgagaaactgaatagctgtcataaaatgaaactttctttctaaagaaagatactcacatgagttcttgaagaatagtcataactagattaagatctgtgttttagtttaatagtttgaagtgcctgtttgggataatgataggtaatttagatgaatttaggggaaaaaaaagttatctgcagatatgttgagggcccatctctccccccacacccccacagagctaactgggttacagtgttttatccgaaagtttccaattccactgtcttgtgttttcatgttgaaaatacttttgcatttttcctttgagtgccaatttcttactagtactatttcttaatgtaacatgtttacctggaatgtattttaactatttttgtatagtgtaaactgaaacatgcacattttgtacattgtgctttcttttgtgggacatatgcagtgtgatccagttgttttccatcatttggttgcgctgacctaggaatgttggtcatatcaaacattaaaaatgaccactcttttaattgaaattaacttttaaatgtttataggagtatgtgctgtgaagtgatctaaaatttgtaatatttttgtcatgaactgtactactcctaattattgtaatgtaataaaaatagttacagtgacaaaaaaaaaaaaaaa

SEQ ID NO: 66 - protein, 188 aa, Artificial sequence
  Synthetic Construct
MTEYKLVVVGAGGVGKSALTIQLIQNHFVDEYDPTIEDSYRKQVVIDGETCLLDILDTAGEEEYSAMRDQYMRTGEGFLCVFAINNTKSFEDIHHYREQIKRVKDSEDVPMVLVGNKCDLPSRTVDTKQAQDLARSYGIPFIETSAKTRQGVDDAFYTLVREIRKHKEKMSKDGKKKKKKSKTKCVIM

SEQ ID NO: 67 - DNA, 5312 bp, Artificial sequence
  /note="Description of Artificial Sequence: mutated Homo sapiens v-Ki-ras2 Kirsten rat sarcoma viral oncogene homolog (KRAS), transcript variant b, mutation KRAS_ Q61H"
  CDS (182)..(748)
ggccgcggcggcggaggcagcagcggcggcggcagtggcggcggcgaaggtggcggcggctcggccagtactcccggcccccgccatttcggactgggagcgagcgcggcgcaggcactgaaggcggcggcggggccagaggctcagcggctcccaggtgcgggagagaggcctgctgaaaatgactgaatataaacttgtggtagttggagctggtggcgtaggcaagagtgccttgacgatacagctaattcagaatcattttgtggacgaatatgatccaacaatagaggattcctacaggaagcaagtagtaattgatggagaaacctgtctcttggatattctcgacacagcaggtcatgaggagtacagtgcaatgagggaccagtacatgaggactggggagggctttctttgtgtatttgccataaataatactaaatcatttgaagatattcaccattatagagaacaaattaaaagagttaaggactctgaagatgtacctatggtcctagtaggaaataaatgtgatttgccttctagaacagtagacacaaaacaggctcaggacttagcaagaagttatggaattccttttattgaaacatcagcaaagacaagacagggtgttgatgatgccttctatacattagttcgagaaattcgaaaacataaagaaaagatgagcaaagatggtaaaaagaagaaaaagaagtcaaagacaaagtgtgtaattatgtaaatacaatttgtacttttttcttaaggcatactagtacaagtggtaatttttgtacattacactaaattattagcatttgttttagcattacctaatttttttcctgctccatgcagactgttagcttttaccttaaatgcttattttaaaatgacagtggaagtttttttttcctctaagtgccagtattcccagagttttggtttttgaactagcaatgcctgtgaaaaagaaactgaatacctaagatttctgtcttggggtttttggtgcatgcagttgattacttcttatttttcttaccaattgtgaatgttggtgtgaaacaaattaatgaagcttttgaatcatccctattctgtgttttatctagtcacataaatggattaattactaatttcagttgagaccttctaattggtttttactgaaacattgagggaacacaaatttatgggcttcctgatgatgattcttctaggcatcatgtcctatagtttgtcatccctgatgaatgtaaagttacactgttcacaaaggttttgtctcctttccactgctattagtcatggtcactctccccaaaatattatattttttctataaaaagaaaaaaatggaaaaaaattacaaggcaatggaaactattataaggccatttccttttcacattagataaattactataaagactcctaatagcttttcctgttaaggcagacccagtatgaaatggggattattatagcaaccattttggggctatatttacatgctactaaatttttataataattgaaaagattttaacaagtataaaaaattctcataggaattaaatgtagtctccctgtgtcagactgctctttcatagtataactttaaatcttttcttcaacttgagtctttgaagatagttttaattctgcttgtgacattaaaagattatttgggccagttatagcttattaggtgttgaagagaccaaggttgcaaggccaggccctgtgtgaacctttgagctttcatagagagtttcacagcatggactgtgtccccacggtcatccagtgttgtcatgcattggttagtcaaaatggggagggactagggcagtttggatagctcaacaagatacaatctcactctgtggtggtcctgctgacaaatcaagagcattgcttttgtttcttaagaaaacaaactcttttttaaaaattacttttaaatattaactcaaaagttgagattttggggtggtggtgtgccaagacattaattttttttttaaacaatgaagtgaaaaagttttacaatctctaggtttggctagttctcttaacactggttaaattaacattgcataaacacttttcaagtctgatccatatttaataatgctttaaaataaaaataaaaacaatccttttgataaatttaaaatgttacttattttaaaataaatgaagtgagatggcatggtgaggtgaaagtatcactggactaggaagaaggtgacttaggttctagataggtgtcttttaggactctgattttgaggacatcacttactatccatttcttcatgttaaaagaagtcatctcaaactcttagttttttttttttacaactatgtaatttatattccatttacataaggatacacttatttgtcaagctcagcacaatctgtaaatttttaacctatgttacaccatcttcagtgccagtcttgggcaaaattgtgcaagaggtgaagtttatatttgaatatccattctcgttttaggactcttcttccatattagtgtcatcttgcctccctaccttccacatgccccatgacttgatgcagttttaatacttgtaattcccctaaccataagatttactgctgctgtggatatctccatgaagttttcccactgagtcacatcagaaatgccctacatcttatttcctcagggctcaagagaatctgacagataccataaagggatttgacctaatcactaattttcaggtggtggctgatgctttgaacatctctttgctgcccaatccattagcgacagtaggatttttcaaacctggtatgaatagacagaaccctatccagtggaaggagaatttaataaagatagtgctgaaagaattccttaggtaatctataactaggactactcctggtaacagtaatacattccattgttttagtaaccagaaatcttcatgcaatgaaaaatactttaattcatgaagcttactttttttttttggtgtcagagtctcgctcttgtcacccaggctggaatgcagtggcgccatctcagctcactgcaacctccatctcccaggttcaagcgattctcgtgcctcggcctcctgagtagctgggattacaggcgtgtgccactacactcaactaatttttgtatttttaggagagacggggtttcaccctgttggccaggctggtctcgaactcctgacctcaagtgattcacccaccttggcctcataaacctgttttgcagaactcatttattcagcaaatatttattgagtgcctaccagatgccagtcaccgcacaaggcactgggtatatggtatccccaaacaagagacataatcccggtccttaggtagtgctagtgtggtctgtaatatcttactaaggcctttggtatacgacccagagataacacgatgcgtattttagttttgcaaagaaggggtttggtctctgtgccagctctataattgttttgctacgattccactgaaactcttcgatcaagctactttatgtaaatcacttcattgttttaaaggaataaacttgattatattgtttttttatttggcataactgtgattcttttaggacaattactgtacacattaaggtgtatgtcagatattcatattgacccaaatgtgtaatattccagttttctctgcataagtaattaaaatatacttaaaaattaatagttttatctgggtacaaataaacaggtgcctgaactagttcacagacaaggaaacttctatgtaaaaatcactatgatttctgaattgctatgtgaaactacagatctttggaacactgtttaggtagggtgttaagacttacacagtacctcgtttctacacagagaaagaaatggccatacttcaggaactgcagtgcttatgaggggatatttaggcctcttgaatttttgatgtagatgggcatttttttaaggtagtggttaattacctttatgtgaactttgaatggtttaacaaaagatttgtttttgtagagattttaaagggggagaattctagaaataaatgttacctaattattacagccttaaagacaaaaatccttgttgaagtttttttaaaaaaagctaaattacatagacttaggcattaacatgtttgtggaagaatatagcagacgtatattgtatcatttgagtgaatgttcccaagtaggcattctaggctctatttaactgagtcacactgcataggaatttagaacctaacttttataggttatcaaaactgttgtcaccattgcacaattttgtcctaatatatacatagaaactttgtggggcatgttaagttacagtttgcacaagttcatctcatttgtattccattgattttttttttcttctaaacattttttcttcaaacagtatataactttttttaggggatttttttttagacagcaaaaactatctgaagatttccatttgtcaaaaagtaatgatttcttgataattgtgtagtaatgttttttagaacccagcagttaccttaaagctgaatttatatttagtaacttctgtgttaatactggatagcatgaattctgcattgagaaactgaatagctgtcataaaatgaaactttctttctaaagaaagatactcacatgagttcttgaagaatagtcataactagattaagatctgtgttttagtttaatagtttgaagtgcctgtttgggataatgataggtaatttagatgaatttaggggaaaaaaaagttatctgcagatatgttgagggcccatctctccccccacacccccacagagctaactgggttacagtgttttatccgaaagtttccaattccactgtcttgtgttttcatgttgaaaatacttttgcatttttcctttgagtgccaatttcttactagtactatttcttaatgtaacatgtttacctggaatgtattttaactatttttgtatagtgtaaactgaaacatgcacattttgtacattgtgctttcttttgtgggacatatgcagtgtgatccagttgttttccatcatttggttgcgctgacctaggaatgttggtcatatcaaacattaaaaatgaccactcttttaattgaaattaacttttaaatgtttataggagtatgtgctgtgaagtgatctaaaatttgtaatatttttgtcatgaactgtactactcctaattattgtaatgtaataaaaatagttacagtgacaaaaaaaaaaaaaaa

SEQ ID NO: 68 - protein, 188 aa, Artificial sequence [sequence omitted]

SEQ ID NO: 69 - DNA, 5312 bp, Artificial sequence
  /note="Description of Artificial Sequence: mutated Homo sapiens v-Ki-ras2 Kirsten rat sarcoma viral oncogene homolog (KRAS), transcript variant b, mutation KRAS_ Q61H"
  CDS (182)..(748)
ggccgcggcggcggaggcagcagcggcggcggcagtggcggcggcgaaggtggcggcggctcggccagtactcccggcccccgccatttcggactgggagcgagcgcggcgcaggcactgaaggcggcggcggggccagaggctcagcggctcccaggtgcgggagagaggcctgctgaaaatgactgaatataaacttgtggtagttggagctggtggcgtaggcaagagtgccttgacgatacagctaattcagaatcattttgtggacgaatatgatccaacaatagaggattcctacaggaagcaagtagtaattgatggagaaacctgtctcttggatattctcgacacagcaggtcacgaggagtacagtgcaatgagggaccagtacatgaggactggggagggctttctttgtgtatttgccataaataatactaaatcatttgaagatattcaccattatagagaacaaattaaaagagttaaggactctgaagatgtacctatggtcctagtaggaaataaatgtgatttgccttctagaacagtagacacaaaacaggctcaggacttagcaagaagttatggaattccttttattgaaacatcagcaaagacaagacagggtgttgatgatgccttctatacattagttcgagaaattcgaaaacataaagaaaagatgagcaaagatggtaaaaagaagaaaaagaagtcaaagacaaagtgtgtaattatgtaaatacaatttgtacttttttcttaaggcatactagtacaagtggtaatttttgtacattacactaaattattagcatttgttttagcattacctaatttttttcctgctccatgcagactgttagcttttaccttaaatgcttattttaaaatgacagtggaagtttttttttcctctaagtgccagtattcccagagttttggtttttgaactagcaatgcctgtgaaaaagaaactgaatacctaagatttctgtcttggggtttttggtgcatgcagttgattacttcttatttttcttaccaattgtgaatgttggtgtgaaacaaattaatgaagcttttgaatcatccctattctgtgttttatctagtcacataaatggattaattactaatttcagttgagaccttctaattggtttttactgaaacattgagggaacacaaatttatgggcttcctgatgatgattcttctaggcatcatgtcctatagtttgtcatccctgatgaatgtaaagttacactgttcacaaaggttttgtctcctttccactgctattagtcatggtcactctccccaaaatattatattttttctataaaaagaaaaaaatggaaaaaaattacaaggcaatggaaactattataaggccatttccttttcacattagataaattactataaagactcctaatagcttttcctgttaaggcagacccagtatgaaatggggattattatagcaaccattttggggctatatttacatgctactaaatttttataataattgaaaagattttaacaagtataaaaaattctcataggaattaaatgtagtctccctgtgtcagactgctctttcatagtataactttaaatcttttcttcaacttgagtctttgaagatagttttaattctgcttgtgacattaaaagattatttgggccagttatagcttattaggtgttgaagagaccaaggttgcaaggccaggccctgtgtgaacctttgagctttcatagagagtttcacagcatggactgtgtccccacggtcatccagtgttgtcatgcattggttagtcaaaatggggagggactagggcagtttggatagctcaacaagatacaatctcactctgtggtggtcctgctgacaaatcaagagcattgcttttgtttcttaagaaaacaaactcttttttaaaaattacttttaaatattaactcaaaagttgagattttggggtggtggtgtgccaagacattaattttttttttaaacaatgaagtgaaaaagttttacaatctctaggtttggctagttctcttaacactggttaaattaacattgcataaacacttttcaagtctgatccatatttaataatgctttaaaataaaaataaaaacaatccttttgataaatttaaaatgttacttattttaaaataaatgaagtgagatggcatggtgaggtgaaagtatcactggactaggaagaaggtgacttaggttctagataggtgtcttttaggactctgattttgaggacatcacttactatccatttcttcatgttaaaagaagtcatctcaaactcttagttttttttttttacaactatgtaatttatattccatttacataaggatacacttatttgtcaagctcagcacaatctgtaaatttttaacctatgttacaccatcttcagtgccagtcttgggcaaaattgtgcaagaggtgaagtttatatttgaatatccattctcgttttaggactcttcttccatattagtgtcatcttgcctccctaccttccacatgccccatgacttgatgcagttttaatacttgtaattcccctaaccataagatttactgctgctgtggatatctccatgaagttttcccactgagtcacatcagaaatgccctacatcttatttcctcagggctcaagagaatctgacagataccataaagggatttgacctaatcactaattttcaggtggtggctgatgctttgaacatctctttgctgcccaatccattagcgacagtaggatttttcaaacctggtatgaatagacagaaccctatccagtggaaggagaatttaataaagatagtgctgaaagaattccttaggtaatctataactaggactactcctggtaacagtaatacattccattgttttagtaaccagaaatcttcatgcaatgaaaaatactttaattcatgaagcttactttttttttttggtgtcagagtctcgctcttgtcacccaggctggaatgcagtggcgccatctcagctcactgcaacctccatctcccaggttcaagcgattctcgtgcctcggcctcctgagtagctgggattacaggcgtgtgccactacactcaactaatttttgtatttttaggagagacggggtttcaccctgttggccaggctggtctcgaactcctgacctcaagtgattcacccaccttggcctcataaacctgttttgcagaactcatttattcagcaaatatttattgagtgcctaccagatgccagtcaccgcacaaggcactgggtatatggtatccccaaacaagagacataatcccggtccttaggtagtgctagtgtggtctgtaatatcttactaaggcctttggtatacgacccagagataacacgatgcgtattttagttttgcaaagaaggggtttggtctctgtgccagctctataattgttttgctacgattccactgaaactcttcgatcaagctactttatgtaaatcacttcattgttttaaaggaataaacttgattatattgtttttttatttggcataactgtgattcttttaggacaattactgtacacattaaggtgtatgtcagatattcatattgacccaaatgtgtaatattccagttttctctgcataagtaattaaaatatacttaaaaattaatagttttatctgggtacaaataaacaggtgcctgaactagttcacagacaaggaaacttctatgtaaaaatcactatgatttctgaattgctatgtgaaactacagatctttggaacactgtttaggtagggtgttaagacttacacagtacctcgtttctacacagagaaagaaatggccatacttcaggaactgcagtgcttatgaggggatatttaggcctcttgaatttttgatgtagatgggcatttttttaaggtagtggttaattacctttatgtgaactttgaatggtttaacaaaagatttgtttttgtagagattttaaagggggagaattctagaaataaatgttacctaattattacagccttaaagacaaaaatccttgttgaagtttttttaaaaaaagctaaattacatagacttaggcattaacatgtttgtggaagaatatagcagacgtatattgtatcatttgagtgaatgttcccaagtaggcattctaggctctatttaactgagtcacactgcataggaatttagaacctaacttttataggttatcaaaactgttgtcaccattgcacaattttgtcctaatatatacatagaaactttgtggggcatgttaagttacagtttgcacaagttcatctcatttgtattccattgattttttttttcttctaaacattttttcttcaaacagtatataactttttttaggggatttttttttagacagcaaaaactatctgaagatttccatttgtcaaaaagtaatgatttcttgataattgtgtagtaatgttttttagaacccagcagttaccttaaagctgaatttatatttagtaacttctgtgttaatactggatagcatgaattctgcattgagaaactgaatagctgtcataaaatgaaactttctttctaaagaaagatactcacatgagttcttgaagaatagtcataactagattaagatctgtgttttagtttaatagtttgaagtgcctgtttgggataatgataggtaatttagatgaatttaggggaaaaaaaagttatctgcagatatgttgagggcccatctctccccccacacccccacagagctaactgggttacagtgttttatccgaaagtttccaattccactgtcttgtgttttcatgttgaaaatacttttgcatttttcctttgagtgccaatttcttactagtactatttcttaatgtaacatgtttacctggaatgtattttaactatttttgtatagtgtaaactgaaacatgcacattttgtacattgtgctttcttttgtgggacatatgcagtgtgatccagttgttttccatcatttggttgcgctgacctaggaatgttggtcatatcaaacattaaaaatgaccactcttttaattgaaattaacttttaaatgtttataggagtatgtgctgtgaagtgatctaaaatttgtaatatttttgtcatgaactgtactactcctaattattgtaatgtaataaaaatagttacagtgacaaaaaaaaaaaaaaa

SEQ ID NO: 70 - protein, 188 aa, Artificial sequence [sequence omitted]

SEQ ID NO: 71 - DNA, 5312 bp, Artificial sequence
  /note="Description of Artificial Sequence: mutated Homo sapiens v-Ki-ras2 Kirsten rat sarcoma viral oncogene homolog (KRAS), transcript variant b, mutation KRAS_ Q61K"
  CDS (182)..(748)
ggccgcggcggcggaggcagcagcggcggcggcagtggcggcggcgaaggtggcggcggctcggccagtactcccggcccccgccatttcggactgggagcgagcgcggcgcaggcactgaaggcggcggcggggccagaggctcagcggctcccaggtgcgggagagaggcctgctgaaaatgactgaatataaacttgtggtagttggagctggtggcgtaggcaagagtgccttgacgatacagctaattcagaatcattttgtggacgaatatgatccaacaatagaggattcctacaggaagcaagtagtaattgatggagaaacctgtctcttggatattctcgacacagcaggtaaagaggagtacagtgcaatgagggaccagtacatgaggactggggagggctttctttgtgtatttgccataaataatactaaatcatttgaagatattcaccattatagagaacaaattaaaagagttaaggactctgaagatgtacctatggtcctagtaggaaataaatgtgatttgccttctagaacagtagacacaaaacaggctcaggacttagcaagaagttatggaattccttttattgaaacatcagcaaagacaagacagggtgttgatgatgccttctatacattagttcgagaaattcgaaaacataaagaaaagatgagcaaagatggtaaaaagaagaaaaagaagtcaaagacaaagtgtgtaattatgtaaatacaatttgtacttttttcttaaggcatactagtacaagtggtaatttttgtacattacactaaattattagcatttgttttagcattacctaatttttttcctgctccatgcagactgttagcttttaccttaaatgcttattttaaaatgacagtggaagtttttttttcctctaagtgccagtattcccagagttttggtttttgaactagcaatgcctgtgaaaaagaaactgaatacctaagatttctgtcttggggtttttggtgcatgcagttgattacttcttatttttcttaccaattgtgaatgttggtgtgaaacaaattaatgaagcttttgaatcatccctattctgtgttttatctagtcacataaatggattaattactaatttcagttgagaccttctaattggtttttactgaaacattgagggaacacaaatttatgggcttcctgatgatgattcttctaggcatcatgtcctatagtttgtcatccctgatgaatgtaaagttacactgttcacaaaggttttgtctcctttccactgctattagtcatggtcactctccccaaaatattatattttttctataaaaagaaaaaaatggaaaaaaattacaaggcaatggaaactattataaggccatttccttttcacattagataaattactataaagactcctaatagcttttcctgttaaggcagacccagtatgaaatggggattattatagcaaccattttggggctatatttacatgctactaaatttttataataattgaaaagattttaacaagtataaaaaattctcataggaattaaatgtagtctccctgtgtcagactgctctttcatagtataactttaaatcttttcttcaacttgagtctttgaagatagttttaattctgcttgtgacattaaaagattatttgggccagttatagcttattaggtgttgaagagaccaaggttgcaaggccaggccctgtgtgaacctttgagctttcatagagagtttcacagcatggactgtgtccccacggtcatccagtgttgtcatgcattggttagtcaaaatggggagggactagggcagtttggatagctcaacaagatacaatctcactctgtggtggtcctgctgacaaatcaagagcattgcttttgtttcttaagaaaacaaactcttttttaaaaattacttttaaatattaactcaaaagttgagattttggggtggtggtgtgccaagacattaattttttttttaaacaatgaagtgaaaaagttttacaatctctaggtttggctagttctcttaacactggttaaattaacattgcataaacacttttcaagtctgatccatatttaataatgctttaaaataaaaataaaaacaatccttttgataaatttaaaatgttacttattttaaaataaatgaagtgagatggcatggtgaggtgaaagtatcactggactaggaagaaggtgacttaggttctagataggtgtcttttaggactctgattttgaggacatcacttactatccatttcttcatgttaaaagaagtcatctcaaactcttagttttttttttttacaactatgtaatttatattccatttacataaggatacacttatttgtcaagctcagcacaatctgtaaatttttaacctatgttacaccatcttcagtgccagtcttgggcaaaattgtgcaagaggtgaagtttatatttgaatatccattctcgttttaggactcttcttccatattagtgtcatcttgcctccctaccttccacatgccccatgacttgatgcagttttaatacttgtaattcccctaaccataagatttactgctgctgtggatatctccatgaagttttcccactgagtcacatcagaaatgccctacatcttatttcctcagggctcaagagaatctgacagataccataaagggatttgacctaatcactaattttcaggtggtggctgatgctttgaacatctctttgctgcccaatccattagcgacagtaggatttttcaaacctggtatgaatagacagaaccctatccagtggaaggagaatttaataaagatagtgctgaaagaattccttaggtaatctataactaggactactcctggtaacagtaatacattccattgttttagtaaccagaaatcttcatgcaatgaaaaatactttaattcatgaagcttactttttttttttggtgtcagagtctcgctcttgtcacccaggctggaatgcagtggcgccatctcagctcactgcaacctccatctcccaggttcaagcgattctcgtgcctcggcctcctgagtagctgggattacaggcgtgtgccactacactcaactaatttttgtatttttaggagagacggggtttcaccctgttggccaggctggtctcgaactcctgacctcaagtgattcacccaccttggcctcataaacctgttttgcagaactcatttattcagcaaatatttattgagtgcctaccagatgccagtcaccgcacaaggcactgggtatatggtatccccaaacaagagacataatcccggtccttaggtagtgctagtgtggtctgtaatatcttactaaggcctttggtatacgacccagagataacacgatgcgtattttagttttgcaaagaaggggtttggtctctgtgccagctctataattgttttgctacgattccactgaaactcttcgatcaagctactttatgtaaatcacttcattgttttaaaggaataaacttgattatattgtttttttatttggcataactgtgattcttttaggacaattactgtacacattaaggtgtatgtcagatattcatattgacccaaatgtgtaatattccagttttctctgcataagtaattaaaatatacttaaaaattaatagttttatctgggtacaaataaacaggtgcctgaactagttcacagacaaggaaacttctatgtaaaaatcactatgatttctgaattgctatgtgaaactacagatctttggaacactgtttaggtagggtgttaagacttacacagtacctcgtttctacacagagaaagaaatggccatacttcaggaactgcagtgcttatgaggggatatttaggcctcttgaatttttgatgtagatgggcatttttttaaggtagtggttaattacctttatgtgaactttgaatggtttaacaaaagatttgtttttgtagagattttaaagggggagaattctagaaataaatgttacctaattattacagccttaaagacaaaaatccttgttgaagtttttttaaaaaaagctaaattacatagacttaggcattaacatgtttgtggaagaatatagcagacgtatattgtatcatttgagtgaatgttcccaagtaggcattctaggctctatttaactgagtcacactgcataggaatttagaacctaacttttataggttatcaaaactgttgtcaccattgcacaattttgtcctaatatatacatagaaactttgtggggcatgttaagttacagtttgcacaagttcatctcatttgtattccattgattttttttttcttctaaacattttttcttcaaacagtatataactttttttaggggatttttttttagacagcaaaaactatctgaagatttccatttgtcaaaaagtaatgatttcttgataattgtgtagtaatgttttttagaacccagcagttaccttaaagctgaatttatatttagtaacttctgtgttaatactggatagcatgaattctgcattgagaaactgaatagctgtcataaaatgaaactttctttctaaagaaagatactcacatgagttcttgaagaatagtcataactagattaagatctgtgttttagtttaatagtttgaagtgcctgtttgggataatgataggtaatttagatgaatttaggggaaaaaaaagttatctgcagatatgttgagggcccatctctccccccacacccccacagagctaactgggttacagtgttttatccgaaagtttccaattccactgtcttgtgttttcatgttgaaaatacttttgcatttttcctttgagtgccaatttcttactagtactatttcttaatgtaacatgtttacctggaatgtattttaactatttttgtatagtgtaaactgaaacatgcacattttgtacattgtgctttcttttgtgggacatatgcagtgtgatccagttgttttccatcatttggttgcgctgacctaggaatgttggtcatatcaaacattaaaaatgaccactcttttaattgaaattaacttttaaatgtttataggagtatgtgctgtgaagtgatctaaaatttgtaatatttttgtcatgaactgtactactcctaattattgtaatgtaataaaaatagttacagtgacaaaaaaaaaaaaaaa

SEQ ID NO: 72 - protein, 188 aa, Artificial sequence
  Synthetic Construct
MTEYKLVVVGAGGVGKSALTIQLIQNHFVDEYDPTIEDSYRKQVVIDGETCLLDILDTAGKEEYSAMRDQYMRTGEGFLCVFAINNTKSFEDIHHYREQIKRVKDSEDVPMVLVGNKCDLPSRTVDTKQAQDLARSYGIPFIETSAKTRQGVDDAFYTLVREIRKHKEKMSKDGKKKKKKSKTKCVIM

SEQ ID NO: 73 - DNA, 5312 bp, Artificial sequence
  /note="Description of Artificial Sequence: mutated Homo sapiens v-Ki-ras2 Kirsten rat sarcoma viral oncogene homolog (KRAS), transcript variant b, mutation KRAS_ Q61L"
  CDS (182)..(748)
ggccgcggcggcggaggcagcagcggcggcggcagtggcggcggcgaaggtggcggcggctcggccagtactcccggcccccgccatttcggactgggagcgagcgcggcgcaggcactgaaggcggcggcggggccagaggctcagcggctcccaggtgcgggagagaggcctgctgaaaatgactgaatataaacttgtggtagttggagctggtggcgtaggcaagagtgccttgacgatacagctaattcagaatcattttgtggacgaatatgatccaacaatagaggattcctacaggaagcaagtagtaattgatggagaaacctgtctcttggatattctcgacacagcaggtctagaggagtacagtgcaatgagggaccagtacatgaggactggggagggctttctttgtgtatttgccataaataatactaaatcatttgaagatattcaccattatagagaacaaattaaaagagttaaggactctgaagatgtacctatggtcctagtaggaaataaatgtgatttgccttctagaacagtagacacaaaacaggctcaggacttagcaagaagttatggaattccttttattgaaacatcagcaaagacaagacagggtgttgatgatgccttctatacattagttcgagaaattcgaaaacataaagaaaagatgagcaaagatggtaaaaagaagaaaaagaagtcaaagacaaagtgtgtaattatgtaaatacaatttgtacttttttcttaaggcatactagtacaagtggtaatttttgtacattacactaaattattagcatttgttttagcattacctaatttttttcctgctccatgcagactgttagcttttaccttaaatgcttattttaaaatgacagtggaagtttttttttcctctaagtgccagtattcccagagttttggtttttgaactagcaatgcctgtgaaaaagaaactgaatacctaagatttctgtcttggggtttttggtgcatgcagttgattacttcttatttttcttaccaattgtgaatgttggtgtgaaacaaattaatgaagcttttgaatcatccctattctgtgttttatctagtcacataaatggattaattactaatttcagttgagaccttctaattggtttttactgaaacattgagggaacacaaatttatgggcttcctgatgatgattcttctaggcatcatgtcctatagtttgtcatccctgatgaatgtaaagttacactgttcacaaaggttttgtctcctttccactgctattagtcatggtcactctccccaaaatattatattttttctataaaaagaaaaaaatggaaaaaaattacaaggcaatggaaactattataaggccatttccttttcacattagataaattactataaagactcctaatagcttttcctgttaaggcagacccagtatgaaatggggattattatagcaaccattttggggctatatttacatgctactaaatttttataataattgaaaagattttaacaagtataaaaaattctcataggaattaaatgtagtctccctgtgtcagactgctctttcatagtataactttaaatcttttcttcaacttgagtctttgaagatagttttaattctgcttgtgacattaaaagattatttgggccagttatagcttattaggtgttgaagagaccaaggttgcaaggccaggccctgtgtgaacctttgagctttcatagagagtttcacagcatggactgtgtccccacggtcatccagtgttgtcatgcattggttagtcaaaatggggagggactagggcagtttggatagctcaacaagatacaatctcactctgtggtggtcctgctgacaaatcaagagcattgcttttgtttcttaagaaaacaaactcttttttaaaaattacttttaaatattaactcaaaagttgagattttggggtggtggtgtgccaagacattaattttttttttaaacaatgaagtgaaaaagttttacaatctctaggtttggctagttctcttaacactggttaaattaacattgcataaacacttttcaagtctgatccatatttaataatgctttaaaataaaaataaaaacaatccttttgataaatttaaaatgttacttattttaaaataaatgaagtgagatggcatggtgaggtgaaagtatcactggactaggaagaaggtgacttaggttctagataggtgtcttttaggactctgattttgaggacatcacttactatccatttcttcatgttaaaagaagtcatctcaaactcttagttttttttttttacaactatgtaatttatattccatttacataaggatacacttatttgtcaagctcagcacaatctgtaaatttttaacctatgttacaccatcttcagtgccagtcttgggcaaaattgtgcaagaggtgaagtttatatttgaatatccattctcgttttaggactcttcttccatattagtgtcatcttgcctccctaccttccacatgccccatgacttgatgcagttttaatacttgtaattcccctaaccataagatttactgctgctgtggatatctccatgaagttttcccactgagtcacatcagaaatgccctacatcttatttcctcagggctcaagagaatctgacagataccataaagggatttgacctaatcactaattttcaggtggtggctgatgctttgaacatctctttgctgcccaatccattagcgacagtaggatttttcaaacctggtatgaatagacagaaccctatccagtggaaggagaatttaataaagatagtgctgaaagaattccttaggtaatctataactaggactactcctggtaacagtaatacattccattgttttagtaaccagaaatcttcatgcaatgaaaaatactttaattcatgaagcttactttttttttttggtgtcagagtctcgctcttgtcacccaggctggaatgcagtggcgccatctcagctcactgcaacctccatctcccaggttcaagcgattctcgtgcctcggcctcctgagtagctgggattacaggcgtgtgccactacactcaactaatttttgtatttttaggagagacggggtttcaccctgttggccaggctggtctcgaactcctgacctcaagtgattcacccaccttggcctcataaacctgttttgcagaactcatttattcagcaaatatttattgagtgcctaccagatgccagtcaccgcacaaggcactgggtatatggtatccccaaacaagagacataatcccggtccttaggtagtgctagtgtggtctgtaatatcttactaaggcctttggtatacgacccagagataacacgatgcgtattttagttttgcaaagaaggggtttggtctctgtgccagctctataattgttttgctacgattccactgaaactcttcgatcaagctactttatgtaaatcacttcattgttttaaaggaataaacttgattatattgtttttttatttggcataactgtgattcttttaggacaattactgtacacattaaggtgtatgtcagatattcatattgacccaaatgtgtaatattccagttttctctgcataagtaattaaaatatacttaaaaattaatagttttatctgggtacaaataaacaggtgcctgaactagttcacagacaaggaaacttctatgtaaaaatcactatgatttctgaattgctatgtgaaactacagatctttggaacactgtttaggtagggtgttaagacttacacagtacctcgtttctacacagagaaagaaatggccatacttcaggaactgcagtgcttatgaggggatatttaggcctcttgaatttttgatgtagatgggcatttttttaaggtagtggttaattacctttatgtgaactttgaatggtttaacaaaagatttgtttttgtagagattttaaagggggagaattctagaaataaatgttacctaattattacagccttaaagacaaaaatccttgttgaagtttttttaaaaaaagctaaattacatagacttaggcattaacatgtttgtggaagaatatagcagacgtatattgtatcatttgagtgaatgttcccaagtaggcattctaggctctatttaactgagtcacactgcataggaatttagaacctaacttttataggttatcaaaactgttgtcaccattgcacaattttgtcctaatatatacatagaaactttgtggggcatgttaagttacagtttgcacaagttcatctcatttgtattccattgattttttttttcttctaaacattttttcttcaaacagtatataactttttttaggggatttttttttagacagcaaaaactatctgaagatttccatttgtcaaaaagtaatgatttcttgataattgtgtagtaatgttttttagaacccagcagttaccttaaagctgaatttatatttagtaacttctgtgttaatactggatagcatgaattctgcattgagaaactgaatagctgtcataaaatgaaactttctttctaaagaaagatactcacatgagttcttgaagaatagtcataactagattaagatctgtgttttagtttaatagtttgaagtgcctgtttgggataatgataggtaatttagatgaatttaggggaaaaaaaagttatctgcagatatgttgagggcccatctctccccccacacccccacagagctaactgggttacagtgttttatccgaaagtttccaattccactgtcttgtgttttcatgttgaaaatacttttgcatttttcctttgagtgccaatttcttactagtactatttcttaatgtaacatgtttacctggaatgtattttaactatttttgtatagtgtaaactgaaacatgcacattttgtacattgtgctttcttttgtgggacatatgcagtgtgatccagttgttttccatcatttggttgcgctgacctaggaatgttggtcatatcaaacattaaaaatgaccactcttttaattgaaattaacttttaaatgtttataggagtatgtgctgtgaagtgatctaaaatttgtaatatttttgtcatgaactgtactactcctaattattgtaatgtaataaaaatagttacagtgacaaaaaaaaaaaaaaa

SEQ ID NO: 74 - protein, 188 aa, Artificial sequence
  Synthetic Construct
MTEYKLVVVGAGGVGKSALTIQLIQNHFVDEYDPTIEDSYRKQVVIDGETCLLDILDTAGLEEYSAMRDQYMRTGEGFLCVFAINNTKSFEDIHHYREQIKRVKDSEDVPMVLVGNKCDLPSRTVDTKQAQDLARSYGIPFIETSAKTRQGVDDAFYTLVREIRKHKEKMSKDGKKKKKKSKTKCVIM

SEQ ID NO: 75 - DNA, 5312 bp, Artificial sequence
  /note="Description of Artificial Sequence: mutated Homo sapiens v-Ki-ras2 Kirsten rat sarcoma viral oncogene homolog (KRAS), transcript variant b, mutation KRAS_ Q61R"
  CDS (182)..(748)
ggccgcggcggcggaggcagcagcggcggcggcagtggcggcggcgaaggtggcggcggctcggccagtactcccggcccccgccatttcggactgggagcgagcgcggcgcaggcactgaaggcggcggcggggccagaggctcagcggctcccaggtgcgggagagaggcctgctgaaaatgactgaatataaacttgtggtagttggagctggtggcgtaggcaagagtgccttgacgatacagctaattcagaatcattttgtggacgaatatgatccaacaatagaggattcctacaggaagcaagtagtaattgatggagaaacctgtctcttggatattctcgacacagcaggtcgagaggagtacagtgcaatgagggaccagtacatgaggactggggagggctttctttgtgtatttgccataaataatactaaatcatttgaagatattcaccattatagagaacaaattaaaagagttaaggactctgaagatgtacctatggtcctagtaggaaataaatgtgatttgccttctagaacagtagacacaaaacaggctcaggacttagcaagaagttatggaattccttttattgaaacatcagcaaagacaagacagggtgttgatgatgccttctatacattagttcgagaaattcgaaaacataaagaaaagatgagcaaagatggtaaaaagaagaaaaagaagtcaaagacaaagtgtgtaattatgtaaatacaatttgtacttttttcttaaggcatactagtacaagtggtaatttttgtacattacactaaattattagcatttgttttagcattacctaatttttttcctgctccatgcagactgttagcttttaccttaaatgcttattttaaaatgacagtggaagtttttttttcctctaagtgccagtattcccagagttttggtttttgaactagcaatgcctgtgaaaaagaaactgaatacctaagatttctgtcttggggtttttggtgcatgcagttgattacttcttatttttcttaccaattgtgaatgttggtgtgaaacaaattaatgaagcttttgaatcatccctattctgtgttttatctagtcacataaatggattaattactaatttcagttgagaccttctaattggtttttactgaaacattgagggaacacaaatttatgggcttcctgatgatgattcttctaggcatcatgtcctatagtttgtcatccctgatgaatgtaaagttacactgttcacaaaggttttgtctcctttccactgctattagtcatggtcactctccccaaaatattatattttttctataaaaagaaaaaaatggaaaaaaattacaaggcaatggaaactattataaggccatttccttttcacattagataaattactataaagactcctaatagcttttcctgttaaggcagacccagtatgaaatggggattattatagcaaccattttggggctatatttacatgctactaaatttttataataattgaaaagattttaacaagtataaaaaattctcataggaattaaatgtagtctccctgtgtcagactgctctttcatagtataactttaaatcttttcttcaacttgagtctttgaagatagttttaattctgcttgtgacattaaaagattatttgggccagttatagcttattaggtgttgaagagaccaaggttgcaaggccaggccctgtgtgaacctttgagctttcatagagagtttcacagcatggactgtgtccccacggtcatccagtgttgtcatgcattggttagtcaaaatggggagggactagggcagtttggatagctcaacaagatacaatctcactctgtggtggtcctgctgacaaatcaagagcattgcttttgtttcttaagaaaacaaactcttttttaaaaattacttttaaatattaactcaaaagttgagattttggggtggtggtgtgccaagacattaattttttttttaaacaatgaagtgaaaaagttttacaatctctaggtttggctagttctcttaacactggttaaattaacattgcataaacacttttcaagtctgatccatatttaataatgctttaaaataaaaataaaaacaatccttttgataaatttaaaatgttacttattttaaaataaatgaagtgagatggcatggtgaggtgaaagtatcactggactaggaagaaggtgacttaggttctagataggtgtcttttaggactctgattttgaggacatcacttactatccatttcttcatgttaaaagaagtcatctcaaactcttagttttttttttttacaactatgtaatttatattccatttacataaggatacacttatttgtcaagctcagcacaatctgtaaatttttaacctatgttacaccatcttcagtgccagtcttgggcaaaattgtgcaagaggtgaagtttatatttgaatatccattctcgttttaggactcttcttccatattagtgtcatcttgcctccctaccttccacatgccccatgacttgatgcagttttaatacttgtaattcccctaaccataagatttactgctgctgtggatatctccatgaagttttcccactgagtcacatcagaaatgccctacatcttatttcctcagggctcaagagaatctgacagataccataaagggatttgacctaatcactaattttcaggtggtggctgatgctttgaacatctctttgctgcccaatccattagcgacagtaggatttttcaaacctggtatgaatagacagaaccctatccagtggaaggagaatttaataaagatagtgctgaaagaattccttaggtaatctataactaggactactcctggtaacagtaatacattccattgttttagtaaccagaaatcttcatgcaatgaaaaatactttaattcatgaagcttactttttttttttggtgtcagagtctcgctcttgtcacccaggctggaatgcagtggcgccatctcagctcactgcaacctccatctcccaggttcaagcgattctcgtgcctcggcctcctgagtagctgggattacaggcgtgtgccactacactcaactaatttttgtatttttaggagagacggggtttcaccctgttggccaggctggtctcgaactcctgacctcaagtgattcacccaccttggcctcataaacctgttttgcagaactcatttattcagcaaatatttattgagtgcctaccagatgccagtcaccgcacaaggcactgggtatatggtatccccaaacaagagacataatcccggtccttaggtagtgctagtgtggtctgtaatatcttactaaggcctttggtatacgacccagagataacacgatgcgtattttagttttgcaaagaaggggtttggtctctgtgccagctctataattgttttgctacgattccactgaaactcttcgatcaagctactttatgtaaatcacttcattgttttaaaggaataaacttgattatattgtttttttatttggcataactgtgattcttttaggacaattactgtacacattaaggtgtatgtcagatattcatattgacccaaatgtgtaatattccagttttctctgcataagtaattaaaatatacttaaaaattaatagttttatctgggtacaaataaacaggtgcctgaactagttcacagacaaggaaacttctatgtaaaaatcactatgatttctgaattgctatgtgaaactacagatctttggaacactgtttaggtagggtgttaagacttacacagtacctcgtttctacacagagaaagaaatggccatacttcaggaactgcagtgcttatgaggggatatttaggcctcttgaatttttgatgtagatgggcatttttttaaggtagtggttaattacctttatgtgaactttgaatggtttaacaaaagatttgtttttgtagagattttaaagggggagaattctagaaataaatgttacctaattattacagccttaaagacaaaaatccttgttgaagtttttttaaaaaaagctaaattacatagacttaggcattaacatgtttgtggaagaatatagcagacgtatattgtatcatttgagtgaatgttcccaagtaggcattctaggctctatttaactgagtcacactgcataggaatttagaacctaacttttataggttatcaaaactgttgtcaccattgcacaattttgtcctaatatatacatagaaactttgtggggcatgttaagttacagtttgcacaagttcatctcatttgtattccattgattttttttttcttctaaacattttttcttcaaacagtatataactttttttaggggatttttttttagacagcaaaaactatctgaagatttccatttgtcaaaaagtaatgatttcttgataattgtgtagtaatgttttttagaacccagcagttaccttaaagctgaatttatatttagtaacttctgtgttaatactggatagcatgaattctgcattgagaaactgaatagctgtcataaaatgaaactttctttctaaagaaagatactcacatgagttcttgaagaatagtcataactagattaagatctgtgttttagtttaatagtttgaagtgcctgtttgggataatgataggtaatttagatgaatttaggggaaaaaaaagttatctgcagatatgttgagggcccatctctccccccacacccccacagagctaactgggttacagtgttttatccgaaagtttccaattccactgtcttgtgttttcatgttgaaaatacttttgcatttttcctttgagtgccaatttcttactagtactatttcttaatgtaacatgtttacctggaatgtattttaactatttttgtatagtgtaaactgaaacatgcacattttgtacattgtgctttcttttgtgggacatatgcagtgtgatccagttgttttccatcatttggttgcgctgacctaggaatgttggtcatatcaaacattaaaaatgaccactcttttaattgaaattaacttttaaatgtttataggagtatgtgctgtgaagtgatctaaaatttgtaatatttttgtcatgaactgtactactcctaattattgtaatgtaataaaaatagttacagtgacaaaaaaaaaaaaaaa

SEQ ID NO: 76 - protein, 188 aa, Artificial sequence
  Synthetic Construct
MTEYKLVVVGAGGVGKSALTIQLIQNHFVDEYDPTIEDSYRKQVVIDGETCLLDILDTAGREEYSAMRDQYMRTGEGFLCVFAINNTKSFEDIHHYREQIKRVKDSEDVPMVLVGNKCDLPSRTVDTKQAQDLARSYGIPFIETSAKTRQGVDDAFYTLVREIRKHKEKMSKDGKKKKKKSKTKCVIM

SEQ ID NO: 77 - DNA, 5312 bp, Artificial sequence
  /note="Description of Artificial Sequence: mutated Homo sapiens v-Ki-ras2 Kirsten rat sarcoma viral oncogene homolog (KRAS), transcript variant b, mutation KRAS_ Q61P"
  CDS (182)..(748)
ggccgcggcggcggaggcagcagcggcggcggcagtggcggcggcgaaggtggcggcggctcggccagtactcccggcccccgccatttcggactgggagcgagcgcggcgcaggcactgaaggcggcggcggggccagaggctcagcggctcccaggtgcgggagagaggcctgctgaaaatgactgaatataaacttgtggtagttggagctggtggcgtaggcaagagtgccttgacgatacagctaattcagaatcattttgtggacgaatatgatccaacaatagaggattcctacaggaagcaagtagtaattgatggagaaacctgtctcttggatattctcgacacagcaggtccagaggagtacagtgcaatgagggaccagtacatgaggactggggagggctttctttgtgtatttgccataaataatactaaatcatttgaagatattcaccattatagagaacaaattaaaagagttaaggactctgaagatgtacctatggtcctagtaggaaataaatgtgatttgccttctagaacagtagacacaaaacaggctcaggacttagcaagaagttatggaattccttttattgaaacatcagcaaagacaagacagggtgttgatgatgccttctatacattagttcgagaaattcgaaaacataaagaaaagatgagcaaagatggtaaaaagaagaaaaagaagtcaaagacaaagtgtgtaattatgtaaatacaatttgtacttttttcttaaggcatactagtacaagtggtaatttttgtacattacactaaattattagcatttgttttagcattacctaatttttttcctgctccatgcagactgttagcttttaccttaaatgcttattttaaaatgacagtggaagtttttttttcctctaagtgccagtattcccagagttttggtttttgaactagcaatgcctgtgaaaaagaaactgaatacctaagatttctgtcttggggtttttggtgcatgcagttgattacttcttatttttcttaccaattgtgaatgttggtgtgaaacaaattaatgaagcttttgaatcatccctattctgtgttttatctagtcacataaatggattaattactaatttcagttgagaccttctaattggtttttactgaaacattgagggaacacaaatttatgggcttcctgatgatgattcttctaggcatcatgtcctatagtttgtcatccctgatgaatgtaaagttacactgttcacaaaggttttgtctcctttccactgctattagtcatggtcactctccccaaaatattatattttttctataaaaagaaaaaaatggaaaaaaattacaaggcaatggaaactattataaggccatttccttttcacattagataaattactataaagactcctaatagcttttcctgttaaggcagacccagtatgaaatggggattattatagcaaccattttggggctatatttacatgctactaaatttttataataattgaaaagattttaacaagtataaaaaattctcataggaattaaatgtagtctccctgtgtcagactgctctttcatagtataactttaaatcttttcttcaacttgagtctttgaagatagttttaattctgcttgtgacattaaaagattatttgggccagttatagcttattaggtgttgaagagaccaaggttgcaaggccaggccctgtgtgaacctttgagctttcatagagagtttcacagcatggactgtgtccccacggtcatccagtgttgtcatgcattggttagtcaaaatggggagggactagggcagtttggatagctcaacaagatacaatctcactctgtggtggtcctgctgacaaatcaagagcattgcttttgtttcttaagaaaacaaactcttttttaaaaattacttttaaatattaactcaaaagttgagattttggggtggtggtgtgccaagacattaattttttttttaaacaatgaagtgaaaaagttttacaatctctaggtttggctagttctcttaacactggttaaattaacattgcataaacacttttcaagtctgatccatatttaataatgctttaaaataaaaataaaaacaatccttttgataaatttaaaatgttacttattttaaaataaatgaagtgagatggcatggtgaggtgaaagtatcactggactaggaagaaggtgacttaggttctagataggtgtcttttaggactctgattttgaggacatcacttactatccatttcttcatgttaaaagaagtcatctcaaactcttagttttttttttttacaactatgtaatttatattccatttacataaggatacacttatttgtcaagctcagcacaatctgtaaatttttaacctatgttacaccatcttcagtgccagtcttgggcaaaattgtgcaagaggtgaagtttatatttgaatatccattctcgttttaggactcttcttccatattagtgtcatcttgcctccctaccttccacatgccccatgacttgatgcagttttaatacttgtaattcccctaaccataagatttactgctgctgtggatatctccatgaagttttcccactgagtcacatcagaaatgccctacatcttatttcctcagggctcaagagaatctgacagataccataaagggatttgacctaatcactaattttcaggtggtggctgatgctttgaacatctctttgctgcccaatccattagcgacagtaggatttttcaaacctggtatgaatagacagaaccctatccagtggaaggagaatttaataaagatagtgctgaaagaattccttaggtaatctataactaggactactcctggtaacagtaatacattccattgttttagtaaccagaaatcttcatgcaatgaaaaatactttaattcatgaagcttactttttttttttggtgtcagagtctcgctcttgtcacccaggctggaatgcagtggcgccatctcagctcactgcaacctccatctcccaggttcaagcgattctcgtgcctcggcctcctgagtagctgggattacaggcgtgtgccactacactcaactaatttttgtatttttaggagagacggggtttcaccctgttggccaggctggtctcgaactcctgacctcaagtgattcacccaccttggcctcataaacctgttttgcagaactcatttattcagcaaatatttattgagtgcctaccagatgccagtcaccgcacaaggcactgggtatatggtatccccaaacaagagacataatcccggtccttaggtagtgctagtgtggtctgtaatatcttactaaggcctttggtatacgacccagagataacacgatgcgtattttagttttgcaaagaaggggtttggtctctgtgccagctctataattgttttgctacgattccactgaaactcttcgatcaagctactttatgtaaatcacttcattgttttaaaggaataaacttgattatattgtttttttatttggcataactgtgattcttttaggacaattactgtacacattaaggtgtatgtcagatattcatattgacccaaatgtgtaatattccagttttctctgcataagtaattaaaatatacttaaaaattaatagttttatctgggtacaaataaacaggtgcctgaactagttcacagacaaggaaacttctatgtaaaaatcactatgatttctgaattgctatgtgaaactacagatctttggaacactgtttaggtagggtgttaagacttacacagtacctcgtttctacacagagaaagaaatggccatacttcaggaactgcagtgcttatgaggggatatttaggcctcttgaatttttgatgtagatgggcatttttttaaggtagtggttaattacctttatgtgaactttgaatggtttaacaaaagatttgtttttgtagagattttaaagggggagaattctagaaataaatgttacctaattattacagccttaaagacaaaaatccttgttgaagtttttttaaaaaaagctaaattacatagacttaggcattaacatgtttgtggaagaatatagcagacgtatattgtatcatttgagtgaatgttcccaagtaggcattctaggctctatttaactgagtcacactgcataggaatttagaacctaacttttataggttatcaaaactgttgtcaccattgcacaattttgtcctaatatatacatagaaactttgtggggcatgttaagttacagtttgcacaagttcatctcatttgtattccattgattttttttttcttctaaacattttttcttcaaacagtatataactttttttaggggatttttttttagacagcaaaaactatctgaagatttccatttgtcaaaaagtaatgatttcttgataattgtgtagtaatgttttttagaacccagcagttaccttaaagctgaatttatatttagtaacttctgtgttaatactggatagcatgaattctgcattgagaaactgaatagctgtcataaaatgaaactttctttctaaagaaagatactcacatgagttcttgaagaatagtcataactagattaagatctgtgttttagtttaatagtttgaagtgcctgtttgggataatgataggtaatttagatgaatttaggggaaaaaaaagttatctgcagatatgttgagggcccatctctccccccacacccccacagagctaactgggttacagtgttttatccgaaagtttccaattccactgtcttgtgttttcatgttgaaaatacttttgcatttttcctttgagtgccaatttcttactagtactatttcttaatgtaacatgtttacctggaatgtattttaactatttttgtatagtgtaaactgaaacatgcacattttgtacattgtgctttcttttgtgggacatatgcagtgtgatccagttgttttccatcatttggttgcgctgacctaggaatgttggtcatatcaaacattaaaaatgaccactcttttaattgaaattaacttttaaatgtttataggagtatgtgctgtgaagtgatctaaaatttgtaatatttttgtcatgaactgtactactcctaattattgtaatgtaataaaaatagttacagtgacaaaaaaaaaaaaaaa

SEQ ID NO: 78 - protein, 188 aa, Artificial sequence
  Synthetic Construct
MTEYKLVVVGAGGVGKSALTIQLIQNHFVDEYDPTIEDSYRKQVVIDGETCLLDILDTAGPEEYSAMRDQYMRTGEGFLCVFAINNTKSFEDIHHYREQIKRVKDSEDVPMVLVGNKCDLPSRTVDTKQAQDLARSYGIPFIETSAKTRQGVDDAFYTLVREIRKHKEKMSKDGKKKKKKSKTKCVIM

SEQ ID NO: 79 - DNA, 2949 bp, Artificial sequence
  /note="Description of Artificial Sequence: mutated Homo sapiens BRAF, mutation BRAF_G464R"
  CDS (62)..(2362)
cgcctcccttccccctccccgcccgacagcggccgctcgggccccggctctcggttataagatggcggcgctgagcggtggcggtggtggcggcgcggagccgggccaggctctgttcaacggggacatggagcccgaggccggcgccggcgccggcgccgcggcctcttcggctgcggaccctgccattccggaggaggtgtggaatatcaaacaaatgattaagttgacacaggaacatatagaggccctattggacaaatttggtggggagcataatccaccatcaatatatctggaggcctatgaagaatacaccagcaagctagatgcactccaacaaagagaacaacagttattggaatctctggggaacggaactgatttttctgtttctagctctgcatcaatggataccgttacatcttcttcctcttctagcctttcagtgctaccttcatctctttcagtttttcaaaatcccacagatgtggcacggagcaaccccaagtcaccacaaaaacctatcgttagagtcttcctgcccaacaaacagaggacagtggtacctgcaaggtgtggagttacagtccgagacagtctaaagaaagcactgatgatgagaggtctaatcccagagtgctgtgctgtttacagaattcaggatggagagaagaaaccaattggttgggacactgatatttcctggcttactggagaagaattgcatgtggaagtgttggagaatgttccacttacaacacacaactttgtacgaaaaacgtttttcaccttagcattttgtgacttttgtcgaaagctgcttttccagggtttccgctgtcaaacatgtggttataaatttcaccagcgttgtagtacagaagttccactgatgtgtgttaattatgaccaacttgatttgctgtttgtctccaagttctttgaacaccacccaataccacaggaagaggcgtccttagcagagactgccctaacatctggatcatccccttccgcacccgcctcggactctattgggccccaaattctcaccagtccgtctccttcaaaatccattccaattccacagcccttccgaccagcagatgaagatcatcgaaatcaatttgggcaacgagaccgatcctcatcagctcccaatgtgcatataaacacaatagaacctgtcaatattgatgacttgattagagaccaaggatttcgtggtgatggaggatcaaccacaggtttgtctgctaccccccctgcctcattacctggctcactaactaacgtgaaagccttacagaaatctccaggacctcagcgagaaaggaagtcatcttcatcctcagaagacaggaatcgaatgaaaacacttggtagacgggactcgagtgatgattgggagattcctgatgggcagattacagtgggacaaagaattcgatctggatcatttggaacagtctacaagggaaagtggcatggtgatgtggcagtgaaaatgttgaatgtgacagcacctacacctcagcagttacaagccttcaaaaatgaagtaggagtactcaggaaaacacgacatgtgaatatcctactcttcatgggctattccacaaagccacaactggctattgttacccagtggtgtgagggctccagcttgtatcaccatctccatatcattgagaccaaatttgagatgatcaaacttatagatattgcacgacagactgcacagggcatggattacttacacgccaagtcaatcatccacagagacctcaagagtaataatatatttcttcatgaagacctcacagtaaaaataggtgattttggtctagctacagtgaaatctcgatggagtgggtcccatcagtttgaacagttgtctggatccattttgtggatggcaccagaagtcatcagaatgcaagataaaaatccatacagctttcagtcagatgtatatgcatttggaattgttctgtatgaattgatgactggacagttaccttattcaaacatcaacaacagggaccagataatttttatggtgggacgaggatacctgtctccagatctcagtaaggtacggagtaactgtccaaaagccatgaagagattaatggcagagtgcctcaaaaagaaaagagatgagagaccactctttccccaaattctcgcctctattgagctgctggcccgctcattgccaaaaattcaccgcagtgcatcagaaccctccttgaatcgggctggtttccaaacagaggattttagtctatatgcttgtgcttctccaaaaacacccatccaggcagggggatatggtgcgtttcctgtccactgaaacaaatgagtgagagagttcaggagagtagcaacaaaaggaaaataaatgaacatatgtttgcttatatgttaaattgaataaaatactctctttttttttaaggtgaaccaaagaacacttgtgtggttaaagactagatataatttttccccaaactaaaatttatacttaacattggatttttaacatccaagggttaaaatacatagacattgctaaaaattggcagagcctcttctagaggctttactttctgttccgggtttgtatcattcacttggttattttaagtagtaaacttcagtttctcatgcaacttttgttgccagctatcacatgtccactagggactccagaagaagaccctacctatgcctgtgtttgcaggtgagaagttggcagtcggttagcctgggttagataaggcaaactgaacagatctaatttaggaagtcagtagaatttaataattctattattattcttaataatttttctataactatttctttttataacaatttggaaaatgtggatgtcttttatttccttgaagcaataaactaagtttctttttataaaaa

SEQ ID NO: 80 - protein, 766 aa, Artificial sequence
  Synthetic Construct
MAALSGGGGGGAEPGQALFNGDMEPEAGAGAGAAASSAADPAIPEEVWNIKQMIKLTQEHIEALLDKFGGEHNPPSIYLEAYEEYTSKLDALQQREQQLLESLGNGTDFSVSSSASMDTVTSSSSSSLSVLPSSLSVFQNPTDVARSNPKSPQKPIVRVFLPNKQRTVVPARCGVTVRDSLKKALMMRGLIPECCAVYRIQDGEKKPIGWDTDISWLTGEELHVEVLENVPLTTHNFVRKTFFTLAFCDFCRKLLFQGFRCQTCGYKFHQRCSTEVPLMCVNYDQLDLLFVSKFFEHHPIPQEEASLAETALTSGSSPSAPASDSIGPQILTSPSPSKSIPIPQPFRPADEDHRNQFGQRDRSSSAPNVHINTIEPVNIDDLIRDQGFRGDGGSTTGLSATPPASLPGSLTNVKALQKSPGPQRERKSSSSSEDRNRMKTLGRRDSSDDWEIPDGQITVGQRIRSGSFGTVYKGKWHGDVAVKMLNVTAPTPQQLQAFKNEVGVLRKTRHVNILLFMGYSTKPQLAIVTQWCEGSSLYHHLHIIETKFEMIKLIDIARQTAQGMDYLHAKSIIHRDLKSNNIFLHEDLTVKIGDFGLATVKSRWSGSHQFEQLSGSILWMAPEVIRMQDKNPYSFQSDVYAFGIVLYELMTGQLPYSNINNRDQIIFMVGRGYLSPDLSKVRSNCPKAMKRLMAECLKKKRDERPLFPQILASIELLARSLPKIHRSASEPSLNRAGFQTEDFSLYACASPKTPIQAGGYGAFPVH

SEQ ID NO: 81 - DNA, 2949 bp, Artificial sequence
  /note="Description of Artificial Sequence: mutated Homo sapiens BRAF, mutation BRAF_G464V"
  CDS (62)..(2362)
cgcctcccttccccctccccgcccgacagcggccgctcgggccccggctctcggttataagatggcggcgctgagcggtggcggtggtggcggcgcggagccgggccaggctctgttcaacggggacatggagcccgaggccggcgccggcgccggcgccgcggcctcttcggctgcggaccctgccattccggaggaggtgtggaatatcaaacaaatgattaagttgacacaggaacatatagaggccctattggacaaatttggtggggagcataatccaccatcaatatatctggaggcctatgaagaatacaccagcaagctagatgcactccaacaaagagaacaacagttattggaatctctggggaacggaactgatttttctgtttctagctctgcatcaatggataccgttacatcttcttcctcttctagcctttcagtgctaccttcatctctttcagtttttcaaaatcccacagatgtggcacggagcaaccccaagtcaccacaaaaacctatcgttagagtcttcctgcccaacaaacagaggacagtggtacctgcaaggtgtggagttacagtccgagacagtctaaagaaagcactgatgatgagaggtctaatcccagagtgctgtgctgtttacagaattcaggatggagagaagaaaccaattggttgggacactgatatttcctggcttactggagaagaattgcatgtggaagtgttggagaatgttccacttacaacacacaactttgtacgaaaaacgtttttcaccttagcattttgtgacttttgtcgaaagctgcttttccagggtttccgctgtcaaacatgtggttataaatttcaccagcgttgtagtacagaagttccactgatgtgtgttaattatgaccaacttgatttgctgtttgtctccaagttctttgaacaccacccaataccacaggaagaggcgtccttagcagagactgccctaacatctggatcatccccttccgcacccgcctcggactctattgggccccaaattctcaccagtccgtctccttcaaaatccattccaattccacagcccttccgaccagcagatgaagatcatcgaaatcaatttgggcaacgagaccgatcctcatcagctcccaatgtgcatataaacacaatagaacctgtcaatattgatgacttgattagagaccaaggatttcgtggtgatggaggatcaaccacaggtttgtctgctaccccccctgcctcattacctggctcactaactaacgtgaaagccttacagaaatctccaggacctcagcgagaaaggaagtcatcttcatcctcagaagacaggaatcgaatgaaaacacttggtagacgggactcgagtgatgattgggagattcctgatgggcagattacagtgggacaaagaattgtatctggatcatttggaacagtctacaagggaaagtggcatggtgatgtggcagtgaaaatgttgaatgtgacagcacctacacctcagcagttacaagccttcaaaaatgaagtaggagtactcaggaaaacacgacatgtgaatatcctactcttcatgggctattccacaaagccacaactggctattgttacccagtggtgtgagggctccagcttgtatcaccatctccatatcattgagaccaaatttgagatgatcaaacttatagatattgcacgacagactgcacagggcatggattacttacacgccaagtcaatcatccacagagacctcaagagtaataatatatttcttcatgaagacctcacagtaaaaataggtgattttggtctagctacagtgaaatctcgatggagtgggtcccatcagtttgaacagttgtctggatccattttgtggatggcaccagaagtcatcagaatgcaagataaaaatccatacagctttcagtcagatgtatatgcatttggaattgttctgtatgaattgatgactggacagttaccttattcaaacatcaacaacagggaccagataatttttatggtgggacgaggatacctgtctccagatctcagtaaggtacggagtaactgtccaaaagccatgaagagattaatggcagagtgcctcaaaaagaaaagagatgagagaccactctttccccaaattctcgcctctattgagctgctggcccgctcattgccaaaaattcaccgcagtgcatcagaaccctccttgaatcgggctggtttccaaacagaggattttagtctatatgcttgtgcttctccaaaaacacccatccaggcagggggatatggtgcgtttcctgtccactgaaacaaatgagtgagagagttcaggagagtagcaacaaaaggaaaataaatgaacatatgtttgcttatatgttaaattgaataaaatactctctttttttttaaggtgaaccaaagaacacttgtgtggttaaagactagatataatttttccccaaactaaaatttatacttaacattggatttttaacatccaagggttaaaatacatagacattgctaaaaattggcagagcctcttctagaggctttactttctgttccgggtttgtatcattcacttggttattttaagtagtaaacttcagtttctcatgcaacttttgttgccagctatcacatgtccactagggactccagaagaagaccctacctatgcctgtgtttgcaggtgagaagttggcagtcggttagcctgggttagataaggcaaactgaacagatctaatttaggaagtcagtagaatttaataattctattattattcttaataatttttctataactatttctttttataacaatttggaaaatgtggatgtcttttatttccttgaagcaataaactaagtttctttttataaaaa

SEQ ID NO: 82 - protein, 766 aa, Artificial sequence
  Synthetic Construct
MAALSGGGGGGAEPGQALFNGDMEPEAGAGAGAAASSAADPAIPEEVWNIKQMIKLTQEHIEALLDKFGGEHNPPSIYLEAYEEYTSKLDALQQREQQLLESLGNGTDFSVSSSASMDTVTSSSSSSLSVLPSSLSVFQNPTDVARSNPKSPQKPIVRVFLPNKQRTVVPARCGVTVRDSLKKALMMRGLIPECCAVYRIQDGEKKPIGWDTDISWLTGEELHVEVLENVPLTTHNFVRKTFFTLAFCDFCRKLLFQGFRCQTCGYKFHQRCSTEVPLMCVNYDQLDLLFVSKFFEHHPIPQEEASLAETALTSGSSPSAPASDSIGPQILTSPSPSKSIPIPQPFRPADEDHRNQFGQRDRSSSAPNVHINTIEPVNIDDLIRDQGFRGDGGSTTGLSATPPASLPGSLTNVKALQKSPGPQRERKSSSSSEDRNRMKTLGRRDSSDDWEIPDGQITVGQRIVSGSFGTVYKGKWHGDVAVKMLNVTAPTPQQLQAFKNEVGVLRKTRHVNILLFMGYSTKPQLAIVTQWCEGSSLYHHLHIIETKFEMIKLIDIARQTAQGMDYLHAKSIIHRDLKSNNIFLHEDLTVKIGDFGLATVKSRWSGSHQFEQLSGSILWMAPEVIRMQDKNPYSFQSDVYAFGIVLYELMTGQLPYSNINNRDQIIFMVGRGYLSPDLSKVRSNCPKAMKRLMAECLKKKRDERPLFPQILASIELLARSLPKIHRSASEPSLNRAGFQTEDFSLYACASPKTPIQAGGYGAFPVH

SEQ ID NO: 83 - DNA, 2949 bp, Artificial sequence
  /note="Description of Artificial Sequence: mutated Homo sapiens BRAF, mutation BRAF_G466A"
  CDS (62)..(2362)
cgcctcccttccccctccccgcccgacagcggccgctcgggccccggctctcggttataagatggcggcgctgagcggtggcggtggtggcggcgcggagccgggccaggctctgttcaacggggacatggagcccgaggccggcgccggcgccggcgccgcggcctcttcggctgcggaccctgccattccggaggaggtgtggaatatcaaacaaatgattaagttgacacaggaacatatagaggccctattggacaaatttggtggggagcataatccaccatcaatatatctggaggcctatgaagaatacaccagcaagctagatgcactccaacaaagagaacaacagttattggaatctctggggaacggaactgatttttctgtttctagctctgcatcaatggataccgttacatcttcttcctcttctagcctttcagtgctaccttcatctctttcagtttttcaaaatcccacagatgtggcacggagcaaccccaagtcaccacaaaaacctatcgttagagtcttcctgcccaacaaacagaggacagtggtacctgcaaggtgtggagttacagtccgagacagtctaaagaaagcactgatgatgagaggtctaatcccagagtgctgtgctgtttacagaattcaggatggagagaagaaaccaattggttgggacactgatatttcctggcttactggagaagaattgcatgtggaagtgttggagaatgttccacttacaacacacaactttgtacgaaaaacgtttttcaccttagcattttgtgacttttgtcgaaagctgcttttccagggtttccgctgtcaaacatgtggttataaatttcaccagcgttgtagtacagaagttccactgatgtgtgttaattatgaccaacttgatttgctgtttgtctccaagttctttgaacaccacccaataccacaggaagaggcgtccttagcagagactgccctaacatctggatcatccccttccgcacccgcctcggactctattgggccccaaattctcaccagtccgtctccttcaaaatccattccaattccacagcccttccgaccagcagatgaagatcatcgaaatcaatttgggcaacgagaccgatcctcatcagctcccaatgtgcatataaacacaatagaacctgtcaatattgatgacttgattagagaccaaggatttcgtggtgatggaggatcaaccacaggtttgtctgctaccccccctgcctcattacctggctcactaactaacgtgaaagccttacagaaatctccaggacctcagcgagaaaggaagtcatcttcatcctcagaagacaggaatcgaatgaaaacacttggtagacgggactcgagtgatgattgggagattcctgatgggcagattacagtgggacaaagaattggatctgcatcatttggaacagtctacaagggaaagtggcatggtgatgtggcagtgaaaatgttgaatgtgacagcacctacacctcagcagttacaagccttcaaaaatgaagtaggagtactcaggaaaacacgacatgtgaatatcctactcttcatgggctattccacaaagccacaactggctattgttacccagtggtgtgagggctccagcttgtatcaccatctccatatcattgagaccaaatttgagatgatcaaacttatagatattgcacgacagactgcacagggcatggattacttacacgccaagtcaatcatccacagagacctcaagagtaataatatatttcttcatgaagacctcacagtaaaaataggtgattttggtctagctacagtgaaatctcgatggagtgggtcccatcagtttgaacagttgtctggatccattttgtggatggcaccagaagtcatcagaatgcaagataaaaatccatacagctttcagtcagatgtatatgcatttggaattgttctgtatgaattgatgactggacagttaccttattcaaacatcaacaacagggaccagataatttttatggtgggacgaggatacctgtctccagatctcagtaaggtacggagtaactgtccaaaagccatgaagagattaatggcagagtgcctcaaaaagaaaagagatgagagaccactctttccccaaattctcgcctctattgagctgctggcccgctcattgccaaaaattcaccgcagtgcatcagaaccctccttgaatcgggctggtttccaaacagaggattttagtctatatgcttgtgcttctccaaaaacacccatccaggcagggggatatggtgcgtttcctgtccactgaaacaaatgagtgagagagttcaggagagtagcaacaaaaggaaaataaatgaacatatgtttgcttatatgttaaattgaataaaatactctctttttttttaaggtgaaccaaagaacacttgtgtggttaaagactagatataatttttccccaaactaaaatttatacttaacattggatttttaacatccaagggttaaaatacatagacattgctaaaaattggcagagcctcttctagaggctttactttctgttccgggtttgtatcattcacttggttattttaagtagtaaacttcagtttctcatgcaacttttgttgccagctatcacatgtccactagggactccagaagaagaccctacctatgcctgtgtttgcaggtgagaagttggcagtcggttagcctgggttagataaggcaaactgaacagatctaatttaggaagtcagtagaatttaataattctattattattcttaataatttttctataactatttctttttataacaatttggaaaatgtggatgtcttttatttccttgaagcaataaactaagtttctttttataaaaa

SEQ ID NO: 84 - protein, 766 aa, Artificial sequence
  Synthetic Construct
MAALSGGGGGGAEPGQALFNGDMEPEAGAGAGAAASSAADPAIPEEVWNIKQMIKLTQEHIEALLDKFGGEHNPPSIYLEAYEEYTSKLDALQQREQQLLESLGNGTDFSVSSSASMDTVTSSSSSSLSVLPSSLSVFQNPTDVARSNPKSPQKPIVRVFLPNKQRTVVPARCGVTVRDSLKKALMMRGLIPECCAVYRIQDGEKKPIGWDTDISWLTGEELHVEVLENVPLTTHNFVRKTFFTLAFCDFCRKLLFQGFRCQTCGYKFHQRCSTEVPLMCVNYDQLDLLFVSKFFEHHPIPQEEASLAETALTSGSSPSAPASDSIGPQILTSPSPSKSIPIPQPFRPADEDHRNQFGQRDRSSSAPNVHINTIEPVNIDDLIRDQGFRGDGGSTTGLSATPPASLPGSLTNVKALQKSPGPQRERKSSSSSEDRNRMKTLGRRDSSDDWEIPDGQITVGQRIGSASFGTVYKGKWHGDVAVKMLNVTAPTPQQLQAFKNEVGVLRKTRHVNILLFMGYSTKPQLAIVTQWCEGSSLYHHLHIIETKFEMIKLIDIARQTAQGMDYLHAKSIIHRDLKSNNIFLHEDLTVKIGDFGLATVKSRWSGSHQFEQLSGSILWMAPEVIRMQDKNPYSFQSDVYAFGIVLYELMTGQLPYSNINNRDQIIFMVGRGYLSPDLSKVRSNCPKAMKRLMAECLKKKRDERPLFPQILASIELLARSLPKIHRSASEPSLNRAGFQTEDFSLYACASPKTPIQAGGYGAFPVH

SEQ ID NO: 85 - DNA, 2949 bp, Artificial sequence
  /note="Description of Artificial Sequence: mutated Homo sapiens BRAF, mutation BRAF_G466R"
  CDS (62)..(2362)
cgcctcccttccccctccccgcccgacagcggccgctcgggccccggctctcggttataagatggcggcgctgagcggtggcggtggtggcggcgcggagccgggccaggctctgttcaacggggacatggagcccgaggccggcgccggcgccggcgccgcggcctcttcggctgcggaccctgccattccggaggaggtgtggaatatcaaacaaatgattaagttgacacaggaacatatagaggccctattggacaaatttggtggggagcataatccaccatcaatatatctggaggcctatgaagaatacaccagcaagctagatgcactccaacaaagagaacaacagttattggaatctctggggaacggaactgatttttctgtttctagctctgcatcaatggataccgttacatcttcttcctcttctagcctttcagtgctaccttcatctctttcagtttttcaaaatcccacagatgtggcacggagcaaccccaagtcaccacaaaaacctatcgttagagtcttcctgcccaacaaacagaggacagtggtacctgcaaggtgtggagttacagtccgagacagtctaaagaaagcactgatgatgagaggtctaatcccagagtgctgtgctgtttacagaattcaggatggagagaagaaaccaattggttgggacactgatatttcctggcttactggagaagaattgcatgtggaagtgttggagaatgttccacttacaacacacaactttgtacgaaaaacgtttttcaccttagcattttgtgacttttgtcgaaagctgcttttccagggtttccgctgtcaaacatgtggttataaatttcaccagcgttgtagtacagaagttccactgatgtgtgttaattatgaccaacttgatttgctgtttgtctccaagttctttgaacaccacccaataccacaggaagaggcgtccttagcagagactgccctaacatctggatcatccccttccgcacccgcctcggactctattgggccccaaattctcaccagtccgtctccttcaaaatccattccaattccacagcccttccgaccagcagatgaagatcatcgaaatcaatttgggcaacgagaccgatcctcatcagctcccaatgtgcatataaacacaatagaacctgtcaatattgatgacttgattagagaccaaggatttcgtggtgatggaggatcaaccacaggtttgtctgctaccccccctgcctcattacctggctcactaactaacgtgaaagccttacagaaatctccaggacctcagcgagaaaggaagtcatcttcatcctcagaagacaggaatcgaatgaaaacacttggtagacgggactcgagtgatgattgggagattcctgatgggcagattacagtgggacaaagaattggatctcgatcatttggaacagtctacaagggaaagtggcatggtgatgtggcagtgaaaatgttgaatgtgacagcacctacacctcagcagttacaagccttcaaaaatgaagtaggagtactcaggaaaacacgacatgtgaatatcctactcttcatgggctattccacaaagccacaactggctattgttacccagtggtgtgagggctccagcttgtatcaccatctccatatcattgagaccaaatttgagatgatcaaacttatagatattgcacgacagactgcacagggcatggattacttacacgccaagtcaatcatccacagagacctcaagagtaataatatatttcttcatgaagacctcacagtaaaaataggtgattttggtctagctacagtgaaatctcgatggagtgggtcccatcagtttgaacagttgtctggatccattttgtggatggcaccagaagtcatcagaatgcaagataaaaatccatacagctttcagtcagatgtatatgcatttggaattgttctgtatgaattgatgactggacagttaccttattcaaacatcaacaacagggaccagataatttttatggtgggacgaggatacctgtctccagatctcagtaaggtacggagtaactgtccaaaagccatgaagagattaatggcagagtgcctcaaaaagaaaagagatgagagaccactctttccccaaattctcgcctctattgagctgctggcccgctcattgccaaaaattcaccgcagtgcatcagaaccctccttgaatcgggctggtttccaaacagaggattttagtctatatgcttgtgcttctccaaaaacacccatccaggcagggggatatggtgcgtttcctgtccactgaaacaaatgagtgagagagttcaggagagtagcaacaaaaggaaaataaatgaacatatgtttgcttatatgttaaattgaataaaatactctctttttttttaaggtgaaccaaagaacacttgtgtggttaaagactagatataatttttccccaaactaaaatttatacttaacattggatttttaacatccaagggttaaaatacatagacattgctaaaaattggcagagcctcttctagaggctttactttctgttccgggtttgtatcattcacttggttattttaagtagtaaacttcagtttctcatgcaacttttgttgccagctatcacatgtccactagggactccagaagaagaccctacctatgcctgtgtttgcaggtgagaagttggcagtcggttagcctgggttagataaggcaaactgaacagatctaatttaggaagtcagtagaatttaataattctattattattcttaataatttttctataactatttctttttataacaatttggaaaatgtggatgtcttttatttccttgaagcaataaactaagtttctttttataaaaa

SEQ ID NO: 86 - protein, 766 aa, Artificial sequence
  Synthetic Construct
MAALSGGGGGGAEPGQALFNGDMEPEAGAGAGAAASSAADPAIPEEVWNIKQMIKLTQEHIEALLDKFGGEHNPPSIYLEAYEEYTSKLDALQQREQQLLESLGNGTDFSVSSSASMDTVTSSSSSSLSVLPSSLSVFQNPTDVARSNPKSPQKPIVRVFLPNKQRTVVPARCGVTVRDSLKKALMMRGLIPECCAVYRIQDGEKKPIGWDTDISWLTGEELHVEVLENVPLTTHNFVRKTFFTLAFCDFCRKLLFQGFRCQTCGYKFHQRCSTEVPLMCVNYDQLDLLFVSKFFEHHPIPQEEASLAETALTSGSSPSAPASDSIGPQILTSPSPSKSIPIPQPFRPADEDHRNQFGQRDRSSSAPNVHINTIEPVNIDDLIRDQGFRGDGGSTTGLSATPPASLPGSLTNVKALQKSPGPQRERKSSSSSEDRNRMKTLGRRDSSDDWEIPDGQITVGQRIGSRSFGTVYKGKWHGDVAVKMLNVTAPTPQQLQAFKNEVGVLRKTRHVNILLFMGYSTKPQLAIVTQWCEGSSLYHHLHIIETKFEMIKLIDIARQTAQGMDYLHAKSIIHRDLKSNNIFLHEDLTVKIGDFGLATVKSRWSGSHQFEQLSGSILWMAPEVIRMQDKNPYSFQSDVYAFGIVLYELMTGQLPYSNINNRDQIIFMVGRGYLSPDLSKVRSNCPKAMKRLMAECLKKKRDERPLFPQILASIELLARSLPKIHRSASEPSLNRAGFQTEDFSLYACASPKTPIQAGGYGAFPVH

SEQ ID NO: 87 - DNA, 2949 bp, Artificial sequence
  /note="Description of Artificial Sequence: mutated Homo sapiens BRAF, mutation BRAF_ F468C"
  CDS (62)..(2362)
cgcctcccttccccctccccgcccgacagcggccgctcgggccccggctctcggttataagatggcggcgctgagcggtggcggtggtggcggcgcggagccgggccaggctctgttcaacggggacatggagcccgaggccggcgccggcgccggcgccgcggcctcttcggctgcggaccctgccattccggaggaggtgtggaatatcaaacaaatgattaagttgacacaggaacatatagaggccctattggacaaatttggtggggagcataatccaccatcaatatatctggaggcctatgaagaatacaccagcaagctagatgcactccaacaaagagaacaacagttattggaatctctggggaacggaactgatttttctgtttctagctctgcatcaatggataccgttacatcttcttcctcttctagcctttcagtgctaccttcatctctttcagtttttcaaaatcccacagatgtggcacggagcaaccccaagtcaccacaaaaacctatcgttagagtcttcctgcccaacaaacagaggacagtggtacctgcaaggtgtggagttacagtccgagacagtctaaagaaagcactgatgatgagaggtctaatcccagagtgctgtgctgtttacagaattcaggatggagagaagaaaccaattggttgggacactgatatttcctggcttactggagaagaattgcatgtggaagtgttggagaatgttccacttacaacacacaactttgtacgaaaaacgtttttcaccttagcattttgtgacttttgtcgaaagctgcttttccagggtttccgctgtcaaacatgtggttataaatttcaccagcgttgtagtacagaagttccactgatgtgtgttaattatgaccaacttgatttgctgtttgtctccaagttctttgaacaccacccaataccacaggaagaggcgtccttagcagagactgccctaacatctggatcatccccttccgcacccgcctcggactctattgggccccaaattctcaccagtccgtctccttcaaaatccattccaattccacagcccttccgaccagcagatgaagatcatcgaaatcaatttgggcaacgagaccgatcctcatcagctcccaatgtgcatataaacacaatagaacctgtcaatattgatgacttgattagagaccaaggatttcgtggtgatggaggatcaaccacaggtttgtctgctaccccccctgcctcattacctggctcactaactaacgtgaaagccttacagaaatctccaggacctcagcgagaaaggaagtcatcttcatcctcagaagacaggaatcgaatgaaaacacttggtagacgggactcgagtgatgattgggagattcctgatgggcagattacagtgggacaaagaattggatctggatcatgtggaacagtctacaagggaaagtggcatggtgatgtggcagtgaaaatgttgaatgtgacagcacctacacctcagcagttacaagccttcaaaaatgaagtaggagtactcaggaaaacacgacatgtgaatatcctactcttcatgggctattccacaaagccacaactggctattgttacccagtggtgtgagggctccagcttgtatcaccatctccatatcattgagaccaaatttgagatgatcaaacttatagatattgcacgacagactgcacagggcatggattacttacacgccaagtcaatcatccacagagacctcaagagtaataatatatttcttcatgaagacctcacagtaaaaataggtgattttggtctagctacagtgaaatctcgatggagtgggtcccatcagtttgaacagttgtctggatccattttgtggatggcaccagaagtcatcagaatgcaagataaaaatccatacagctttcagtcagatgtatatgcatttggaattgttctgtatgaattgatgactggacagttaccttattcaaacatcaacaacagggaccagataatttttatggtgggacgaggatacctgtctccagatctcagtaaggtacggagtaactgtccaaaagccatgaagagattaatggcagagtgcctcaaaaagaaaagagatgagagaccactctttccccaaattctcgcctctattgagctgctggcccgctcattgccaaaaattcaccgcagtgcatcagaaccctccttgaatcgggctggtttccaaacagaggattttagtctatatgcttgtgcttctccaaaaacacccatccaggcagggggatatggtgcgtttcctgtccactgaaacaaatgagtgagagagttcaggagagtagcaacaaaaggaaaataaatgaacatatgtttgcttatatgttaaattgaataaaatactctctttttttttaaggtgaaccaaagaacacttgtgtggttaaagactagatataatttttccccaaactaaaatttatacttaacattggatttttaacatccaagggttaaaatacatagacattgctaaaaattggcagagcctcttctagaggctttactttctgttccgggtttgtatcattcacttggttattttaagtagtaaacttcagtttctcatgcaacttttgttgccagctatcacatgtccactagggactccagaagaagaccctacctatgcctgtgtttgcaggtgagaagttggcagtcggttagcctgggttagataaggcaaactgaacagatctaatttaggaagtcagtagaatttaataattctattattattcttaataatttttctataactatttctttttataacaatttggaaaatgtggatgtcttttatttccttgaagcaataaactaagtttctttttataaaaa

SEQ ID NO: 88 - protein, 766 aa, Artificial sequence
  Synthetic Construct
MAALSGGGGGGAEPGQALFNGDMEPEAGAGAGAAASSAADPAIPEEVWNIKQMIKLTQEHIEALLDKFGGEHNPPSIYLEAYEEYTSKLDALQQREQQLLESLGNGTDFSVSSSASMDTVTSSSSSSLSVLPSSLSVFQNPTDVARSNPKSPQKPIVRVFLPNKQRTVVPARCGVTVRDSLKKALMMRGLIPECCAVYRIQDGEKKPIGWDTDISWLTGEELHVEVLENVPLTTHNFVRKTFFTLAFCDFCRKLLFQGFRCQTCGYKFHQRCSTEVPLMCVNYDQLDLLFVSKFFEHHPIPQEEASLAETALTSGSSPSAPASDSIGPQILTSPSPSKSIPIPQPFRPADEDHRNQFGQRDRSSSAPNVHINTIEPVNIDDLIRDQGFRGDGGSTTGLSATPPASLPGSLTNVKALQKSPGPQRERKSSSSSEDRNRMKTLGRRDSSDDWEIPDGQITVGQRIGSGSCGTVYKGKWHGDVAVKMLNVTAPTPQQLQAFKNEVGVLRKTRHVNILLFMGYSTKPQLAIVTQWCEGSSLYHHLHIIETKFEMIKLIDIARQTAQGMDYLHAKSIIHRDLKSNNIFLHEDLTVKIGDFGLATVKSRWSGSHQFEQLSGSILWMAPEVIRMQDKNPYSFQSDVYAFGIVLYELMTGQLPYSNINNRDQIIFMVGRGYLSPDLSKVRSNCPKAMKRLMAECLKKKRDERPLFPQILASIELLARSLPKIHRSASEPSLNRAGFQTEDFSLYACASPKTPIQAGGYGAFPVH

SEQ ID NO: 89 - DNA, 2949 bp, Artificial sequence
  /note="Description of Artificial Sequence: mutated Homo sapiens BRAF, mutation BRAF_ G469R"
  CDS (62)..(2362)
cgcctcccttccccctccccgcccgacagcggccgctcgggccccggctctcggttataagatggcggcgctgagcggtggcggtggtggcggcgcggagccgggccaggctctgttcaacggggacatggagcccgaggccggcgccggcgccggcgccgcggcctcttcggctgcggaccctgccattccggaggaggtgtggaatatcaaacaaatgattaagttgacacaggaacatatagaggccctattggacaaatttggtggggagcataatccaccatcaatatatctggaggcctatgaagaatacaccagcaagctagatgcactccaacaaagagaacaacagttattggaatctctggggaacggaactgatttttctgtttctagctctgcatcaatggataccgttacatcttcttcctcttctagcctttcagtgctaccttcatctctttcagtttttcaaaatcccacagatgtggcacggagcaaccccaagtcaccacaaaaacctatcgttagagtcttcctgcccaacaaacagaggacagtggtacctgcaaggtgtggagttacagtccgagacagtctaaagaaagcactgatgatgagaggtctaatcccagagtgctgtgctgtttacagaattcaggatggagagaagaaaccaattggttgggacactgatatttcctggcttactggagaagaattgcatgtggaagtgttggagaatgttccacttacaacacacaactttgtacgaaaaacgtttttcaccttagcattttgtgacttttgtcgaaagctgcttttccagggtttccgctgtcaaacatgtggttataaatttcaccagcgttgtagtacagaagttccactgatgtgtgttaattatgaccaacttgatttgctgtttgtctccaagttctttgaacaccacccaataccacaggaagaggcgtccttagcagagactgccctaacatctggatcatccccttccgcacccgcctcggactctattgggccccaaattctcaccagtccgtctccttcaaaatccattccaattccacagcccttccgaccagcagatgaagatcatcgaaatcaatttgggcaacgagaccgatcctcatcagctcccaatgtgcatataaacacaatagaacctgtcaatattgatgacttgattagagaccaaggatttcgtggtgatggaggatcaaccacaggtttgtctgctaccccccctgcctcattacctggctcactaactaacgtgaaagccttacagaaatctccaggacctcagcgagaaaggaagtcatcttcatcctcagaagacaggaatcgaatgaaaacacttggtagacgggactcgagtgatgattgggagattcctgatgggcagattacagtgggacaaagaattggatctggatcatttcgaacagtctacaagggaaagtggcatggtgatgtggcagtgaaaatgttgaatgtgacagcacctacacctcagcagttacaagccttcaaaaatgaagtaggagtactcaggaaaacacgacatgtgaatatcctactcttcatgggctattccacaaagccacaactggctattgttacccagtggtgtgagggctccagcttgtatcaccatctccatatcattgagaccaaatttgagatgatcaaacttatagatattgcacgacagactgcacagggcatggattacttacacgccaagtcaatcatccacagagacctcaagagtaataatatatttcttcatgaagacctcacagtaaaaataggtgattttggtctagctacagtgaaatctcgatggagtgggtcccatcagtttgaacagttgtctggatccattttgtggatggcaccagaagtcatcagaatgcaagataaaaatccatacagctttcagtcagatgtatatgcatttggaattgttctgtatgaattgatgactggacagttaccttattcaaacatcaacaacagggaccagataatttttatggtgggacgaggatacctgtctccagatctcagtaaggtacggagtaactgtccaaaagccatgaagagattaatggcagagtgcctcaaaaagaaaagagatgagagaccactctttccccaaattctcgcctctattgagctgctggcccgctcattgccaaaaattcaccgcagtgcatcagaaccctccttgaatcgggctggtttccaaacagaggattttagtctatatgcttgtgcttctccaaaaacacccatccaggcagggggatatggtgcgtttcctgtccactgaaacaaatgagtgagagagttcaggagagtagcaacaaaaggaaaataaatgaacatatgtttgcttatatgttaaattgaataaaatactctctttttttttaaggtgaaccaaagaacacttgtgtggttaaagactagatataatttttccccaaactaaaatttatacttaacattggatttttaacatccaagggttaaaatacatagacattgctaaaaattggcagagcctcttctagaggctttactttctgttccgggtttgtatcattcacttggttattttaagtagtaaacttcagtttctcatgcaacttttgttgccagctatcacatgtccactagggactccagaagaagaccctacctatgcctgtgtttgcaggtgagaagttggcagtcggttagcctgggttagataaggcaaactgaacagatctaatttaggaagtcagtagaatttaataattctattattattcttaataatttttctataactatttctttttataacaatttggaaaatgtggatgtcttttatttccttgaagcaataaactaagtttctttttataaaaa

SEQ ID NO: 90 - protein, 766 aa, Artificial sequence
  Synthetic Construct
MAALSGGGGGGAEPGQALFNGDMEPEAGAGAGAAASSAADPAIPEEVWNIKQMIKLTQEHIEALLDKFGGEHNPPSIYLEAYEEYTSKLDALQQREQQLLESLGNGTDFSVSSSASMDTVTSSSSSSLSVLPSSLSVFQNPTDVARSNPKSPQKPIVRVFLPNKQRTVVPARCGVTVRDSLKKALMMRGLIPECCAVYRIQDGEKKPIGWDTDISWLTGEELHVEVLENVPLTTHNFVRKTFFTLAFCDFCRKLLFQGFRCQTCGYKFHQRCSTEVPLMCVNYDQLDLLFVSKFFEHHPIPQEEASLAETALTSGSSPSAPASDSIGPQILTSPSPSKSIPIPQPFRPADEDHRNQFGQRDRSSSAPNVHINTIEPVNIDDLIRDQGFRGDGGSTTGLSATPPASLPGSLTNVKALQKSPGPQRERKSSSSSEDRNRMKTLGRRDSSDDWEIPDGQITVGQRIGSGSFRTVYKGKWHGDVAVKMLNVTAPTPQQLQAFKNEVGVLRKTRHVNILLFMGYSTKPQLAIVTQWCEGSSLYHHLHIIETKFEMIKLIDIARQTAQGMDYLHAKSIIHRDLKSNNIFLHEDLTVKIGDFGLATVKSRWSGSHQFEQLSGSILWMAPEVIRMQDKNPYSFQSDVYAFGIVLYELMTGQLPYSNINNRDQIIFMVGRGYLSPDLSKVRSNCPKAMKRLMAECLKKKRDERPLFPQILASIELLARSLPKIHRSASEPSLNRAGFQTEDFSLYACASPKTPIQAGGYGAFPVH

SEQ ID NO: 91 - DNA, 2949 bp, Artificial sequence
  /note="Description of Artificial Sequence: mutated Homo sapiens BRAF, mutation BRAF_ G469R"
  CDS (62)..(2362)
cgcctcccttccccctccccgcccgacagcggccgctcgggccccggctctcggttataagatggcggcgctgagcggtggcggtggtggcggcgcggagccgggccaggctctgttcaacggggacatggagcccgaggccggcgccggcgccggcgccgcggcctcttcggctgcggaccctgccattccggaggaggtgtggaatatcaaacaaatgattaagttgacacaggaacatatagaggccctattggacaaatttggtggggagcataatccaccatcaatatatctggaggcctatgaagaatacaccagcaagctagatgcactccaacaaagagaacaacagttattggaatctctggggaacggaactgatttttctgtttctagctctgcatcaatggataccgttacatcttcttcctcttctagcctttcagtgctaccttcatctctttcagtttttcaaaatcccacagatgtggcacggagcaaccccaagtcaccacaaaaacctatcgttagagtcttcctgcccaacaaacagaggacagtggtacctgcaaggtgtggagttacagtccgagacagtctaaagaaagcactgatgatgagaggtctaatcccagagtgctgtgctgtttacagaattcaggatggagagaagaaaccaattggttgggacactgatatttcctggcttactggagaagaattgcatgtggaagtgttggagaatgttccacttacaacacacaactttgtacgaaaaacgtttttcaccttagcattttgtgacttttgtcgaaagctgcttttccagggtttccgctgtcaaacatgtggttataaatttcaccagcgttgtagtacagaagttccactgatgtgtgttaattatgaccaacttgatttgctgtttgtctccaagttctttgaacaccacccaataccacaggaagaggcgtccttagcagagactgccctaacatctggatcatccccttccgcacccgcctcggactctattgggccccaaattctcaccagtccgtctccttcaaaatccattccaattccacagcccttccgaccagcagatgaagatcatcgaaatcaatttgggcaacgagaccgatcctcatcagctcccaatgtgcatataaacacaatagaacctgtcaatattgatgacttgattagagaccaaggatttcgtggtgatggaggatcaaccacaggtttgtctgctaccccccctgcctcattacctggctcactaactaacgtgaaagccttacagaaatctccaggacctcagcgagaaaggaagtcatcttcatcctcagaagacaggaatcgaatgaaaacacttggtagacgggactcgagtgatgattgggagattcctgatgggcagattacagtgggacaaagaattggatctggatcatttagaacagtctacaagggaaagtggcatggtgatgtggcagtgaaaatgttgaatgtgacagcacctacacctcagcagttacaagccttcaaaaatgaagtaggagtactcaggaaaacacgacatgtgaatatcctactcttcatgggctattccacaaagccacaactggctattgttacccagtggtgtgagggctccagcttgtatcaccatctccatatcattgagaccaaatttgagatgatcaaacttatagatattgcacgacagactgcacagggcatggattacttacacgccaagtcaatcatccacagagacctcaagagtaataatatatttcttcatgaagacctcacagtaaaaataggtgattttggtctagctacagtgaaatctcgatggagtgggtcccatcagtttgaacagttgtctggatccattttgtggatggcaccagaagtcatcagaatgcaagataaaaatccatacagctttcagtcagatgtatatgcatttggaattgttctgtatgaattgatgactggacagttaccttattcaaacatcaacaacagggaccagataatttttatggtgggacgaggatacctgtctccagatctcagtaaggtacggagtaactgtccaaaagccatgaagagattaatggcagagtgcctcaaaaagaaaagagatgagagaccactctttccccaaattctcgcctctattgagctgctggcccgctcattgccaaaaattcaccgcagtgcatcagaaccctccttgaatcgggctggtttccaaacagaggattttagtctatatgcttgtgcttctccaaaaacacccatccaggcagggggatatggtgcgtttcctgtccactgaaacaaatgagtgagagagttcaggagagtagcaacaaaaggaaaataaatgaacatatgtttgcttatatgttaaattgaataaaatactctctttttttttaaggtgaaccaaagaacacttgtgtggttaaagactagatataatttttccccaaactaaaatttatacttaacattggatttttaacatccaagggttaaaatacatagacattgctaaaaattggcagagcctcttctagaggctttactttctgttccgggtttgtatcattcacttggttattttaagtagtaaacttcagtttctcatgcaacttttgttgccagctatcacatgtccactagggactccagaagaagaccctacctatgcctgtgtttgcaggtgagaagttggcagtcggttagcctgggttagataaggcaaactgaacagatctaatttaggaagtcagtagaatttaataattctattattattcttaataatttttctataactatttctttttataacaatttggaaaatgtggatgtcttttatttccttgaagcaataaactaagtttctttttataaaaa

SEQ ID NO: 92 - protein, 766 aa, Artificial sequence; identical to SEQ ID NO: 90
  Synthetic Construct

SEQ ID NO: 93 - DNA, 2949 bp, Artificial sequence
  /note="Description of Artificial Sequence: mutated Homo sapiens BRAF, mutation BRAF_ G469S"
  CDS (62)..(2362)
cgcctcccttccccctccccgcccgacagcggccgctcgggccccggctctcggttataagatggcggcgctgagcggtggcggtggtggcggcgcggagccgggccaggctctgttcaacggggacatggagcccgaggccggcgccggcgccggcgccgcggcctcttcggctgcggaccctgccattccggaggaggtgtggaatatcaaacaaatgattaagttgacacaggaacatatagaggccctattggacaaatttggtggggagcataatccaccatcaatatatctggaggcctatgaagaatacaccagcaagctagatgcactccaacaaagagaacaacagttattggaatctctggggaacggaactgatttttctgtttctagctctgcatcaatggataccgttacatcttcttcctcttctagcctttcagtgctaccttcatctctttcagtttttcaaaatcccacagatgtggcacggagcaaccccaagtcaccacaaaaacctatcgttagagtcttcctgcccaacaaacagaggacagtggtacctgcaaggtgtggagttacagtccgagacagtctaaagaaagcactgatgatgagaggtctaatcccagagtgctgtgctgtttacagaattcaggatggagagaagaaaccaattggttgggacactgatatttcctggcttactggagaagaattgcatgtggaagtgttggagaatgttccacttacaacacacaactttgtacgaaaaacgtttttcaccttagcattttgtgacttttgtcgaaagctgcttttccagggtttccgctgtcaaacatgtggttataaatttcaccagcgttgtagtacagaagttccactgatgtgtgttaattatgaccaacttgatttgctgtttgtctccaagttctttgaacaccacccaataccacaggaagaggcgtccttagcagagactgccctaacatctggatcatccccttccgcacccgcctcggactctattgggccccaaattctcaccagtccgtctccttcaaaatccattccaattccacagcccttccgaccagcagatgaagatcatcgaaatcaatttgggcaacgagaccgatcctcatcagctcccaatgtgcatataaacacaatagaacctgtcaatattgatgacttgattagagaccaaggatttcgtggtgatggaggatcaaccacaggtttgtctgctaccccccctgcctcattacctggctcactaactaacgtgaaagccttacagaaatctccaggacctcagcgagaaaggaagtcatcttcatcctcagaagacaggaatcgaatgaaaacacttggtagacgggactcgagtgatgattgggagattcctgatgggcagattacagtgggacaaagaattggatctggatcatttagcacagtctacaagggaaagtggcatggtgatgtggcagtgaaaatgttgaatgtgacagcacctacacctcagcagttacaagccttcaaaaatgaagtaggagtactcaggaaaacacgacatgtgaatatcctactcttcatgggctattccacaaagccacaactggctattgttacccagtggtgtgagggctccagcttgtatcaccatctccatatcattgagaccaaatttgagatgatcaaacttatagatattgcacgacagactgcacagggcatggattacttacacgccaagtcaatcatccacagagacctcaagagtaataatatatttcttcatgaagacctcacagtaaaaataggtgattttggtctagctacagtgaaatctcgatggagtgggtcccatcagtttgaacagttgtctggatccattttgtggatggcaccagaagtcatcagaatgcaagataaaaatccatacagctttcagtcagatgtatatgcatttggaattgttctgtatgaattgatgactggacagttaccttattcaaacatcaacaacagggaccagataatttttatggtgggacgaggatacctgtctccagatctcagtaaggtacggagtaactgtccaaaagccatgaagagattaatggcagagtgcctcaaaaagaaaagagatgagagaccactctttccccaaattctcgcctctattgagctgctggcccgctcattgccaaaaattcaccgcagtgcatcagaaccctccttgaatcgggctggtttccaaacagaggattttagtctatatgcttgtgcttctccaaaaacacccatccaggcagggggatatggtgcgtttcctgtccactgaaacaaatgagtgagagagttcaggagagtagcaacaaaaggaaaataaatgaacatatgtttgcttatatgttaaattgaataaaatactctctttttttttaaggtgaaccaaagaacacttgtgtggttaaagactagatataatttttccccaaactaaaatttatacttaacattggatttttaacatccaagggttaaaatacatagacattgctaaaaattggcagagcctcttctagaggctttactttctgttccgggtttgtatcattcacttggttattttaagtagtaaacttcagtttctcatgcaacttttgttgccagctatcacatgtccactagggactccagaagaagaccctacctatgcctgtgtttgcaggtgagaagttggcagtcggttagcctgggttagataaggcaaactgaacagatctaatttaggaagtcagtagaatttaataattctattattattcttaataatttttctataactatttctttttataacaatttggaaaatgtggatgtcttttatttccttgaagcaataaactaagtttctttttataaaaa

SEQ ID NO: 94 - protein, 766 aa, Artificial sequence
  Synthetic Construct
MAALSGGGGGGAEPGQALFNGDMEPEAGAGAGAAASSAADPAIPEEVWNIKQMIKLTQEHIEALLDKFGGEHNPPSIYLEAYEEYTSKLDALQQREQQLLESLGNGTDFSVSSSASMDTVTSSSSSSLSVLPSSLSVFQNPTDVARSNPKSPQKPIVRVFLPNKQRTVVPARCGVTVRDSLKKALMMRGLIPECCAVYRIQDGEKKPIGWDTDISWLTGEELHVEVLENVPLTTHNFVRKTFFTLAFCDFCRKLLFQGFRCQTCGYKFHQRCSTEVPLMCVNYDQLDLLFVSKFFEHHPIPQEEASLAETALTSGSSPSAPASDSIGPQILTSPSPSKSIPIPQPFRPADEDHRNQFGQRDRSSSAPNVHINTIEPVNIDDLIRDQGFRGDGGSTTGLSATPPASLPGSLTNVKALQKSPGPQRERKSSSSSEDRNRMKTLGRRDSSDDWEIPDGQITVGQRIGSGSFSTVYKGKWHGDVAVKMLNVTAPTPQQLQAFKNEVGVLRKTRHVNILLFMGYSTKPQLAIVTQWCEGSSLYHHLHIIETKFEMIKLIDIARQTAQGMDYLHAKSIIHRDLKSNNIFLHEDLTVKIGDFGLATVKSRWSGSHQFEQLSGSILWMAPEVIRMQDKNPYSFQSDVYAFGIVLYELMTGQLPYSNINNRDQIIFMVGRGYLSPDLSKVRSNCPKAMKRLMAECLKKKRDERPLFPQILASIELLARSLPKIHRSASEPSLNRAGFQTEDFSLYACASPKTPIQAGGYGAFPVH

SEQ ID NO: 95 - DNA, 2949 bp, Artificial sequence
  /note="Description of Artificial Sequence: mutated Homo sapiens BRAF, mutation BRAF_ G464E"
  CDS (62)..(2362)
cgcctcccttccccctccccgcccgacagcggccgctcgggccccggctctcggttataagatggcggcgctgagcggtggcggtggtggcggcgcggagccgggccaggctctgttcaacggggacatggagcccgaggccggcgccggcgccggcgccgcggcctcttcggctgcggaccctgccattccggaggaggtgtggaatatcaaacaaatgattaagttgacacaggaacatatagaggccctattggacaaatttggtggggagcataatccaccatcaatatatctggaggcctatgaagaatacaccagcaagctagatgcactccaacaaagagaacaacagttattggaatctctggggaacggaactgatttttctgtttctagctctgcatcaatggataccgttacatcttcttcctcttctagcctttcagtgctaccttcatctctttcagtttttcaaaatcccacagatgtggcacggagcaaccccaagtcaccacaaaaacctatcgttagagtcttcctgcccaacaaacagaggacagtggtacctgcaaggtgtggagttacagtccgagacagtctaaagaaagcactgatgatgagaggtctaatcccagagtgctgtgctgtttacagaattcaggatggagagaagaaaccaattggttgggacactgatatttcctggcttactggagaagaattgcatgtggaagtgttggagaatgttccacttacaacacacaactttgtacgaaaaacgtttttcaccttagcattttgtgacttttgtcgaaagctgcttttccagggtttccgctgtcaaacatgtggttataaatttcaccagcgttgtagtacagaagttccactgatgtgtgttaattatgaccaacttgatttgctgtttgtctccaagttctttgaacaccacccaataccacaggaagaggcgtccttagcagagactgccctaacatctggatcatccccttccgcacccgcctcggactctattgggccccaaattctcaccagtccgtctccttcaaaatccattccaattccacagcccttccgaccagcagatgaagatcatcgaaatcaatttgggcaacgagaccgatcctcatcagctcccaatgtgcatataaacacaatagaacctgtcaatattgatgacttgattagagaccaaggatttcgtggtgatggaggatcaaccacaggtttgtctgctaccccccctgcctcattacctggctcactaactaacgtgaaagccttacagaaatctccaggacctcagcgagaaaggaagtcatcttcatcctcagaagacaggaatcgaatgaaaacacttggtagacgggactcgagtgatgattgggagattcctgatgggcagattacagtgggacaaagaattgaatctggatcatttggaacagtctacaagggaaagtggcatggtgatgtggcagtgaaaatgttgaatgtgacagcacctacacctcagcagttacaagccttcaaaaatgaagtaggagtactcaggaaaacacgacatgtgaatatcctactcttcatgggctattccacaaagccacaactggctattgttacccagtggtgtgagggctccagcttgtatcaccatctccatatcattgagaccaaatttgagatgatcaaacttatagatattgcacgacagactgcacagggcatggattacttacacgccaagtcaatcatccacagagacctcaagagtaataatatatttcttcatgaagacctcacagtaaaaataggtgattttggtctagctacagtgaaatctcgatggagtgggtcccatcagtttgaacagttgtctggatccattttgtggatggcaccagaagtcatcagaatgcaagataaaaatccatacagctttcagtcagatgtatatgcatttggaattgttctgtatgaattgatgactggacagttaccttattcaaacatcaacaacagggaccagataatttttatggtgggacgaggatacctgtctccagatctcagtaaggtacggagtaactgtccaaaagccatgaagagattaatggcagagtgcctcaaaaagaaaagagatgagagaccactctttccccaaattctcgcctctattgagctgctggcccgctcattgccaaaaattcaccgcagtgcatcagaaccctccttgaatcgggctggtttccaaacagaggattttagtctatatgcttgtgcttctccaaaaacacccatccaggcagggggatatggtgcgtttcctgtccactgaaacaaatgagtgagagagttcaggagagtagcaacaaaaggaaaataaatgaacatatgtttgcttatatgttaaattgaataaaatactctctttttttttaaggtgaaccaaagaacacttgtgtggttaaagactagatataatttttccccaaactaaaatttatacttaacattggatttttaacatccaagggttaaaatacatagacattgctaaaaattggcagagcctcttctagaggctttactttctgttccgggtttgtatcattcacttggttattttaagtagtaaacttcagtttctcatgcaacttttgttgccagctatcacatgtccactagggactccagaagaagaccctacctatgcctgtgtttgcaggtgagaagttggcagtcggttagcctgggttagataaggcaaactgaacagatctaatttaggaagtcagtagaatttaataattctattattattcttaataatttttctataactatttctttttataacaatttggaaaatgtggatgtcttttatttccttgaagcaataaactaagtttctttttataaaaa

SEQ ID NO: 96 - protein, 766 aa, Artificial sequence
  Synthetic Construct
MAALSGGGGGGAEPGQALFNGDMEPEAGAGAGAAASSAADPAIPEEVWNIKQMIKLTQEHIEALLDKFGGEHNPPSIYLEAYEEYTSKLDALQQREQQLLESLGNGTDFSVSSSASMDTVTSSSSSSLSVLPSSLSVFQNPTDVARSNPKSPQKPIVRVFLPNKQRTVVPARCGVTVRDSLKKALMMRGLIPECCAVYRIQDGEKKPIGWDTDISWLTGEELHVEVLENVPLTTHNFVRKTFFTLAFCDFCRKLLFQGFRCQTCGYKFHQRCSTEVPLMCVNYDQLDLLFVSKFFEHHPIPQEEASLAETALTSGSSPSAPASDSIGPQILTSPSPSKSIPIPQPFRPADEDHRNQFGQRDRSSSAPNVHINTIEPVNIDDLIRDQGFRGDGGSTTGLSATPPASLPGSLTNVKALQKSPGPQRERKSSSSSEDRNRMKTLGRRDSSDDWEIPDGQITVGQRIESGSFGTVYKGKWHGDVAVKMLNVTAPTPQQLQAFKNEVGVLRKTRHVNILLFMGYSTKPQLAIVTQWCEGSSLYHHLHIIETKFEMIKLIDIARQTAQGMDYLHAKSIIHRDLKSNNIFLHEDLTVKIGDFGLATVKSRWSGSHQFEQLSGSILWMAPEVIRMQDKNPYSFQSDVYAFGIVLYELMTGQLPYSNINNRDQIIFMVGRGYLSPDLSKVRSNCPKAMKRLMAECLKKKRDERPLFPQILASIELLARSLPKIHRSASEPSLNRAGFQTEDFSLYACASPKTPIQAGGYGAFPVH

SEQ ID NO: 97 - DNA, 2949 bp, Artificial sequence
  /note="Description of Artificial Sequence: mutated Homo sapiens BRAF, mutation BRAF_ G466V"
  CDS (62)..(2362)
cgcctcccttccccctccccgcccgacagcggccgctcgggccccggctctcggttataagatggcggcgctgagcggtggcggtggtggcggcgcggagccgggccaggctctgttcaacggggacatggagcccgaggccggcgccggcgccggcgccgcggcctcttcggctgcggaccctgccattccggaggaggtgtggaatatcaaacaaatgattaagttgacacaggaacatatagaggccctattggacaaatttggtggggagcataatccaccatcaatatatctggaggcctatgaagaatacaccagcaagctagatgcactccaacaaagagaacaacagttattggaatctctggggaacggaactgatttttctgtttctagctctgcatcaatggataccgttacatcttcttcctcttctagcctttcagtgctaccttcatctctttcagtttttcaaaatcccacagatgtggcacggagcaaccccaagtcaccacaaaaacctatcgttagagtcttcctgcccaacaaacagaggacagtggtacctgcaaggtgtggagttacagtccgagacagtctaaagaaagcactgatgatgagaggtctaatcccagagtgctgtgctgtttacagaattcaggatggagagaagaaaccaattggttgggacactgatatttcctggcttactggagaagaattgcatgtggaagtgttggagaatgttccacttacaacacacaactttgtacgaaaaacgtttttcaccttagcattttgtgacttttgtcgaaagctgcttttccagggtttccgctgtcaaacatgtggttataaatttcaccagcgttgtagtacagaagttccactgatgtgtgttaattatgaccaacttgatttgctgtttgtctccaagttctttgaacaccacccaataccacaggaagaggcgtccttagcagagactgccctaacatctggatcatccccttccgcacccgcctcggactctattgggccccaaattctcaccagtccgtctccttcaaaatccattccaattccacagcccttccgaccagcagatgaagatcatcgaaatcaatttgggcaacgagaccgatcctcatcagctcccaatgtgcatataaacacaatagaacctgtcaatattgatgacttgattagagaccaaggatttcgtggtgatggaggatcaaccacaggtttgtctgctaccccccctgcctcattacctggctcactaactaacgtgaaagccttacagaaatctccaggacctcagcgagaaaggaagtcatcttcatcctcagaagacaggaatcgaatgaaaacacttggtagacgggactcgagtgatgattgggagattcctgatgggcagattacagtgggacaaagaattggatctgtatcatttggaacagtctacaagggaaagtggcatggtgatgtggcagtgaaaatgttgaatgtgacagcacctacacctcagcagttacaagccttcaaaaatgaagtaggagtactcaggaaaacacgacatgtgaatatcctactcttcatgggctattccacaaagccacaactggctattgttacccagtggtgtgagggctccagcttgtatcaccatctccatatcattgagaccaaatttgagatgatcaaacttatagatattgcacgacagactgcacagggcatggattacttacacgccaagtcaatcatccacagagacctcaagagtaataatatatttcttcatgaagacctcacagtaaaaataggtgattttggtctagctacagtgaaatctcgatggagtgggtcccatcagtttgaacagttgtctggatccattttgtggatggcaccagaagtcatcagaatgcaagataaaaatccatacagctttcagtcagatgtatatgcatttggaattgttctgtatgaattgatgactggacagttaccttattcaaacatcaacaacagggaccagataatttttatggtgggacgaggatacctgtctccagatctcagtaaggtacggagtaactgtccaaaagccatgaagagattaatggcagagtgcctcaaaaagaaaagagatgagagaccactctttccccaaattctcgcctctattgagctgctggcccgctcattgccaaaaattcaccgcagtgcatcagaaccctccttgaatcgggctggtttccaaacagaggattttagtctatatgcttgtgcttctccaaaaacacccatccaggcagggggatatggtgcgtttcctgtccactgaaacaaatgagtgagagagttcaggagagtagcaacaaaaggaaaataaatgaacatatgtttgcttatatgttaaattgaataaaatactctctttttttttaaggtgaaccaaagaacacttgtgtggttaaagactagatataatttttccccaaactaaaatttatacttaacattggatttttaacatccaagggttaaaatacatagacattgctaaaaattggcagagcctcttctagaggctttactttctgttccgggtttgtatcattcacttggttattttaagtagtaaacttcagtttctcatgcaacttttgttgccagctatcacatgtccactagggactccagaagaagaccctacctatgcctgtgtttgcaggtgagaagttggcagtcggttagcctgggttagataaggcaaactgaacagatctaatttaggaagtcagtagaatttaataattctattattattcttaataatttttctataactatttctttttataacaatttggaaaatgtggatgtcttttatttccttgaagcaataaactaagtttctttttataaaaa

SEQ ID NO: 98 - protein, 766 aa, Artificial sequence
  Synthetic Construct
MAALSGGGGGGAEPGQALFNGDMEPEAGAGAGAAASSAADPAIPEEVWNIKQMIKLTQEHIEALLDKFGGEHNPPSIYLEAYEEYTSKLDALQQREQQLLESLGNGTDFSVSSSASMDTVTSSSSSSLSVLPSSLSVFQNPTDVARSNPKSPQKPIVRVFLPNKQRTVVPARCGVTVRDSLKKALMMRGLIPECCAVYRIQDGEKKPIGWDTDISWLTGEELHVEVLENVPLTTHNFVRKTFFTLAFCDFCRKLLFQGFRCQTCGYKFHQRCSTEVPLMCVNYDQLDLLFVSKFFEHHPIPQEEASLAETALTSGSSPSAPASDSIGPQILTSPSPSKSIPIPQPFRPADEDHRNQFGQRDRSSSAPNVHINTIEPVNIDDLIRDQGFRGDGGSTTGLSATPPASLPGSLTNVKALQKSPGPQRERKSSSSSEDRNRMKTLGRRDSSDDWEIPDGQITVGQRIGSVSFGTVYKGKWHGDVAVKMLNVTAPTPQQLQAFKNEVGVLRKTRHVNILLFMGYSTKPQLAIVTQWCEGSSLYHHLHIIETKFEMIKLIDIARQTAQGMDYLHAKSIIHRDLKSNNIFLHEDLTVKIGDFGLATVKSRWSGSHQFEQLSGSILWMAPEVIRMQDKNPYSFQSDVYAFGIVLYELMTGQLPYSNINNRDQIIFMVGRGYLSPDLSKVRSNCPKAMKRLMAECLKKKRDERPLFPQILASIELLARSLPKIHRSASEPSLNRAGFQTEDFSLYACASPKTPIQAGGYGAFPVH

SEQ ID NO: 99 - DNA, 2949 bp, Artificial sequence
  /note="Description of Artificial Sequence: mutated Homo sapiens BRAF, mutation BRAF_ G466E"
  CDS (62)..(2362)
cgcctcccttccccctccccgcccgacagcggccgctcgggccccggctctcggttataagatggcggcgctgagcggtggcggtggtggcggcgcggagccgggccaggctctgttcaacggggacatggagcccgaggccggcgccggcgccggcgccgcggcctcttcggctgcggaccctgccattccggaggaggtgtggaatatcaaacaaatgattaagttgacacaggaacatatagaggccctattggacaaatttggtggggagcataatccaccatcaatatatctggaggcctatgaagaatacaccagcaagctagatgcactccaacaaagagaacaacagttattggaatctctggggaacggaactgatttttctgtttctagctctgcatcaatggataccgttacatcttcttcctcttctagcctttcagtgctaccttcatctctttcagtttttcaaaatcccacagatgtggcacggagcaaccccaagtcaccacaaaaacctatcgttagagtcttcctgcccaacaaacagaggacagtggtacctgcaaggtgtggagttacagtccgagacagtctaaagaaagcactgatgatgagaggtctaatcccagagtgctgtgctgtttacagaattcaggatggagagaagaaaccaattggttgggacactgatatttcctggcttactggagaagaattgcatgtggaagtgttggagaatgttccacttacaacacacaactttgtacgaaaaacgtttttcaccttagcattttgtgacttttgtcgaaagctgcttttccagggtttccgctgtcaaacatgtggttataaatttcaccagcgttgtagtacagaagttccactgatgtgtgttaattatgaccaacttgatttgctgtttgtctccaagttctttgaacaccacccaataccacaggaagaggcgtccttagcagagactgccctaacatctggatcatccccttccgcacccgcctcggactctattgggccccaaattctcaccagtccgtctccttcaaaatccattccaattccacagcccttccgaccagcagatgaagatcatcgaaatcaatttgggcaacgagaccgatcctcatcagctcccaatgtgcatataaacacaatagaacctgtcaatattgatgacttgattagagaccaaggatttcgtggtgatggaggatcaaccacaggtttgtctgctaccccccctgcctcattacctggctcactaactaacgtgaaagccttacagaaatctccaggacctcagcgagaaaggaagtcatcttcatcctcagaagacaggaatcgaatgaaaacacttggtagacgggactcgagtgatgattgggagattcctgatgggcagattacagtgggacaaagaattggatctgaatcatttggaacagtctacaagggaaagtggcatggtgatgtggcagtgaaaatgttgaatgtgacagcacctacacctcagcagttacaagccttcaaaaatgaagtaggagtactcaggaaaacacgacatgtgaatatcctactcttcatgggctattccacaaagccacaactggctattgttacccagtggtgtgagggctccagcttgtatcaccatctccatatcattgagaccaaatttgagatgatcaaacttatagatattgcacgacagactgcacagggcatggattacttacacgccaagtcaatcatccacagagacctcaagagtaataatatatttcttcatgaagacctcacagtaaaaataggtgattttggtctagctacagtgaaatctcgatggagtgggtcccatcagtttgaacagttgtctggatccattttgtggatggcaccagaagtcatcagaatgcaagataaaaatccatacagctttcagtcagatgtatatgcatttggaattgttctgtatgaattgatgactggacagttaccttattcaaacatcaacaacagggaccagataatttttatggtgggacgaggatacctgtctccagatctcagtaaggtacggagtaactgtccaaaagccatgaagagattaatggcagagtgcctcaaaaagaaaagagatgagagaccactctttccccaaattctcgcctctattgagctgctggcccgctcattgccaaaaattcaccgcagtgcatcagaaccctccttgaatcgggctggtttccaaacagaggattttagtctatatgcttgtgcttctccaaaaacacccatccaggcagggggatatggtgcgtttcctgtccactgaaacaaatgagtgagagagttcaggagagtagcaacaaaaggaaaataaatgaacatatgtttgcttatatgttaaattgaataaaatactctctttttttttaaggtgaaccaaagaacacttgtgtggttaaagactagatataatttttccccaaactaaaatttatacttaacattggatttttaacatccaagggttaaaatacatagacattgctaaaaattggcagagcctcttctagaggctttactttctgttccgggtttgtatcattcacttggttattttaagtagtaaacttcagtttctcatgcaacttttgttgccagctatcacatgtccactagggactccagaagaagaccctacctatgcctgtgtttgcaggtgagaagttggcagtcggttagcctgggttagataaggcaaactgaacagatctaatttaggaagtcagtagaatttaataattctattattattcttaataatttttctataactatttctttttataacaatttggaaaatgtggatgtcttttatttccttgaagcaataaactaagtttctttttataaaaa

SEQ ID NO: 100 - protein, 766 aa, Artificial sequence
  Synthetic Construct
MAALSGGGGGGAEPGQALFNGDMEPEAGAGAGAAASSAADPAIPEEVWNIKQMIKLTQEHIEALLDKFGGEHNPPSIYLEAYEEYTSKLDALQQREQQLLESLGNGTDFSVSSSASMDTVTSSSSSSLSVLPSSLSVFQNPTDVARSNPKSPQKPIVRVFLPNKQRTVVPARCGVTVRDSLKKALMMRGLIPECCAVYRIQDGEKKPIGWDTDISWLTGEELHVEVLENVPLTTHNFVRKTFFTLAFCDFCRKLLFQGFRCQTCGYKFHQRCSTEVPLMCVNYDQLDLLFVSKFFEHHPIPQEEASLAETALTSGSSPSAPASDSIGPQILTSPSPSKSIPIPQPFRPADEDHRNQFGQRDRSSSAPNVHINTIEPVNIDDLIRDQGFRGDGGSTTGLSATPPASLPGSLTNVKALQKSPGPQRERKSSSSSEDRNRMKTLGRRDSSDDWEIPDGQITVGQRIGSESFGTVYKGKWHGDVAVKMLNVTAPTPQQLQAFKNEVGVLRKTRHVNILLFMGYSTKPQLAIVTQWCEGSSLYHHLHIIETKFEMIKLIDIARQTAQGMDYLHAKSIIHRDLKSNNIFLHEDLTVKIGDFGLATVKSRWSGSHQFEQLSGSILWMAPEVIRMQDKNPYSFQSDVYAFGIVLYELMTGQLPYSNINNRDQIIFMVGRGYLSPDLSKVRSNCPKAMKRLMAECLKKKRDERPLFPQILASIELLARSLPKIHRSASEPSLNRAGFQTEDFSLYACASPKTPIQAGGYGAFPVH

SEQ ID NO: 101 - DNA, 2949 bp, Artificial sequence
  /note="Description of Artificial Sequence: mutated Homo sapiens BRAF, mutation BRAF_ G469A"
  CDS (62)..(2362)
cgcctcccttccccctccccgcccgacagcggccgctcgggccccggctctcggttataagatggcggcgctgagcggtggcggtggtggcggcgcggagccgggccaggctctgttcaacggggacatggagcccgaggccggcgccggcgccggcgccgcggcctcttcggctgcggaccctgccattccggaggaggtgtggaatatcaaacaaatgattaagttgacacaggaacatatagaggccctattggacaaatttggtggggagcataatccaccatcaatatatctggaggcctatgaagaatacaccagcaagctagatgcactccaacaaagagaacaacagttattggaatctctggggaacggaactgatttttctgtttctagctctgcatcaatggataccgttacatcttcttcctcttctagcctttcagtgctaccttcatctctttcagtttttcaaaatcccacagatgtggcacggagcaaccccaagtcaccacaaaaacctatcgttagagtcttcctgcccaacaaacagaggacagtggtacctgcaaggtgtggagttacagtccgagacagtctaaagaaagcactgatgatgagaggtctaatcccagagtgctgtgctgtttacagaattcaggatggagagaagaaaccaattggttgggacactgatatttcctggcttactggagaagaattgcatgtggaagtgttggagaatgttccacttacaacacacaactttgtacgaaaaacgtttttcaccttagcattttgtgacttttgtcgaaagctgcttttccagggtttccgctgtcaaacatgtggttataaatttcaccagcgttgtagtacagaagttccactgatgtgtgttaattatgaccaacttgatttgctgtttgtctccaagttctttgaacaccacccaataccacaggaagaggcgtccttagcagagactgccctaacatctggatcatccccttccgcacccgcctcggactctattgggccccaaattctcaccagtccgtctccttcaaaatccattccaattccacagcccttccgaccagcagatgaagatcatcgaaatcaatttgggcaacgagaccgatcctcatcagctcccaatgtgcatataaacacaatagaacctgtcaatattgatgacttgattagagaccaaggatttcgtggtgatggaggatcaaccacaggtttgtctgctaccccccctgcctcattacctggctcactaactaacgtgaaagccttacagaaatctccaggacctcagcgagaaaggaagtcatcttcatcctcagaagacaggaatcgaatgaaaacacttggtagacgggactcgagtgatgattgggagattcctgatgggcagattacagtgggacaaagaattggatctggatcatttgcaacagtctacaagggaaagtggcatggtgatgtggcagtgaaaatgttgaatgtgacagcacctacacctcagcagttacaagccttcaaaaatgaagtaggagtactcaggaaaacacgacatgtgaatatcctactcttcatgggctattccacaaagccacaactggctattgttacccagtggtgtgagggctccagcttgtatcaccatctccatatcattgagaccaaatttgagatgatcaaacttatagatattgcacgacagactgcacagggcatggattacttacacgccaagtcaatcatccacagagacctcaagagtaataatatatttcttcatgaagacctcacagtaaaaataggtgattttggtctagctacagtgaaatctcgatggagtgggtcccatcagtttgaacagttgtctggatccattttgtggatggcaccagaagtcatcagaatgcaagataaaaatccatacagctttcagtcagatgtatatgcatttggaattgttctgtatgaattgatgactggacagttaccttattcaaacatcaacaacagggaccagataatttttatggtgggacgaggatacctgtctccagatctcagtaaggtacggagtaactgtccaaaagccatgaagagattaatggcagagtgcctcaaaaagaaaagagatgagagaccactctttccccaaattctcgcctctattgagctgctggcccgctcattgccaaaaattcaccgcagtgcatcagaaccctccttgaatcgggctggtttccaaacagaggattttagtctatatgcttgtgcttctccaaaaacacccatccaggcagggggatatggtgcgtttcctgtccactgaaacaaatgagtgagagagttcaggagagtagcaacaaaaggaaaataaatgaacatatgtttgcttatatgttaaattgaataaaatactctctttttttttaaggtgaaccaaagaacacttgtgtggttaaagactagatataatttttccccaaactaaaatttatacttaacattggatttttaacatccaagggttaaaatacatagacattgctaaaaattggcagagcctcttctagaggctttactttctgttccgggtttgtatcattcacttggttattttaagtagtaaacttcagtttctcatgcaacttttgttgccagctatcacatgtccactagggactccagaagaagaccctacctatgcctgtgtttgcaggtgagaagttggcagtcggttagcctgggttagataaggcaaactgaacagatctaatttaggaagtcagtagaatttaataattctattattattcttaataatttttctataactatttctttttataacaatttggaaaatgtggatgtcttttatttccttgaagcaataaactaagtttctttttataaaaa

SEQ ID NO: 102 - protein, 766 aa, Artificial sequence
  Synthetic Construct
MAALSGGGGGGAEPGQALFNGDMEPEAGAGAGAAASSAADPAIPEEVWNIKQMIKLTQEHIEALLDKFGGEHNPPSIYLEAYEEYTSKLDALQQREQQLLESLGNGTDFSVSSSASMDTVTSSSSSSLSVLPSSLSVFQNPTDVARSNPKSPQKPIVRVFLPNKQRTVVPARCGVTVRDSLKKALMMRGLIPECCAVYRIQDGEKKPIGWDTDISWLTGEELHVEVLENVPLTTHNFVRKTFFTLAFCDFCRKLLFQGFRCQTCGYKFHQRCSTEVPLMCVNYDQLDLLFVSKFFEHHPIPQEEASLAETALTSGSSPSAPASDSIGPQILTSPSPSKSIPIPQPFRPADEDHRNQFGQRDRSSSAPNVHINTIEPVNIDDLIRDQGFRGDGGSTTGLSATPPASLPGSLTNVKALQKSPGPQRERKSSSSSEDRNRMKTLGRRDSSDDWEIPDGQITVGQRIGSGSFATVYKGKWHGDVAVKMLNVTAPTPQQLQAFKNEVGVLRKTRHVNILLFMGYSTKPQLAIVTQWCEGSSLYHHLHIIETKFEMIKLIDIARQTAQGMDYLHAKSIIHRDLKSNNIFLHEDLTVKIGDFGLATVKSRWSGSHQFEQLSGSILWMAPEVIRMQDKNPYSFQSDVYAFGIVLYELMTGQLPYSNINNRDQIIFMVGRGYLSPDLSKVRSNCPKAMKRLMAECLKKKRDERPLFPQILASIELLARSLPKIHRSASEPSLNRAGFQTEDFSLYACASPKTPIQAGGYGAFPVH

SEQ ID NO: 103 - DNA, 2949 bp, Artificial sequence
  /note="Description of Artificial Sequence: mutated Homo sapiens BRAF, mutation BRAF_ G469E"
  CDS (62)..(2362)
cgcctcccttccccctccccgcccgacagcggccgctcgggccccggctctcggttataagatggcggcgctgagcggtggcggtggtggcggcgcggagccgggccaggctctgttcaacggggacatggagcccgaggccggcgccggcgccggcgccgcggcctcttcggctgcggaccctgccattccggaggaggtgtggaatatcaaacaaatgattaagttgacacaggaacatatagaggccctattggacaaatttggtggggagcataatccaccatcaatatatctggaggcctatgaagaatacaccagcaagctagatgcactccaacaaagagaacaacagttattggaatctctggggaacggaactgatttttctgtttctagctctgcatcaatggataccgttacatcttcttcctcttctagcctttcagtgctaccttcatctctttcagtttttcaaaatcccacagatgtggcacggagcaaccccaagtcaccacaaaaacctatcgttagagtcttcctgcccaacaaacagaggacagtggtacctgcaaggtgtggagttacagtccgagacagtctaaagaaagcactgatgatgagaggtctaatcccagagtgctgtgctgtttacagaattcaggatggagagaagaaaccaattggttgggacactgatatttcctggcttactggagaagaattgcatgtggaagtgttggagaatgttccacttacaacacacaactttgtacgaaaaacgtttttcaccttagcattttgtgacttttgtcgaaagctgcttttccagggtttccgctgtcaaacatgtggttataaatttcaccagcgttgtagtacagaagttccactgatgtgtgttaattatgaccaacttgatttgctgtttgtctccaagttctttgaacaccacccaataccacaggaagaggcgtccttagcagagactgccctaacatctggatcatccccttccgcacccgcctcggactctattgggccccaaattctcaccagtccgtctccttcaaaatccattccaattccacagcccttccgaccagcagatgaagatcatcgaaatcaatttgggcaacgagaccgatcctcatcagctcccaatgtgcatataaacacaatagaacctgtcaatattgatgacttgattagagaccaaggatttcgtggtgatggaggatcaaccacaggtttgtctgctaccccccctgcctcattacctggctcactaactaacgtgaaagccttacagaaatctccaggacctcagcgagaaaggaagtcatcttcatcctcagaagacaggaatcgaatgaaaacacttggtagacgggactcgagtgatgattgggagattcctgatgggcagattacagtgggacaaagaattggatctggatcatttgaaacagtctacaagggaaagtggcatggtgatgtggcagtgaaaatgttgaatgtgacagcacctacacctcagcagttacaagccttcaaaaatgaagtaggagtactcaggaaaacacgacatgtgaatatcctactcttcatgggctattccacaaagccacaactggctattgttacccagtggtgtgagggctccagcttgtatcaccatctccatatcattgagaccaaatttgagatgatcaaacttatagatattgcacgacagactgcacagggcatggattacttacacgccaagtcaatcatccacagagacctcaagagtaataatatatttcttcatgaagacctcacagtaaaaataggtgattttggtctagctacagtgaaatctcgatggagtgggtcccatcagtttgaacagttgtctggatccattttgtggatggcaccagaagtcatcagaatgcaagataaaaatccatacagctttcagtcagatgtatatgcatttggaattgttctgtatgaattgatgactggacagttaccttattcaaacatcaacaacagggaccagataatttttatggtgggacgaggatacctgtctccagatctcagtaaggtacggagtaactgtccaaaagccatgaagagattaatggcagagtgcctcaaaaagaaaagagatgagagaccactctttccccaaattctcgcctctattgagctgctggcccgctcattgccaaaaattcaccgcagtgcatcagaaccctccttgaatcgggctggtttccaaacagaggattttagtctatatgcttgtgcttctccaaaaacacccatccaggcagggggatatggtgcgtttcctgtccactgaaacaaatgagtgagagagttcaggagagtagcaacaaaaggaaaataaatgaacatatgtttgcttatatgttaaattgaataaaatactctctttttttttaaggtgaaccaaagaacacttgtgtggttaaagactagatataatttttccccaaactaaaatttatacttaacattggatttttaacatccaagggttaaaatacatagacattgctaaaaattggcagagcctcttctagaggctttactttctgttccgggtttgtatcattcacttggttattttaagtagtaaacttcagtttctcatgcaacttttgttgccagctatcacatgtccactagggactccagaagaagaccctacctatgcctgtgtttgcaggtgagaagttggcagtcggttagcctgggttagataaggcaaactgaacagatctaatttaggaagtcagtagaatttaataattctattattattcttaataatttttctataactatttctttttataacaatttggaaaatgtggatgtcttttatttccttgaagcaataaactaagtttctttttataaaaa

SEQ ID NO: 104 - protein, 766 aa, Artificial sequence
  Synthetic Construct
MAALSGGGGGGAEPGQALFNGDMEPEAGAGAGAAASSAADPAIPEEVWNIKQMIKLTQEHIEALLDKFGGEHNPPSIYLEAYEEYTSKLDALQQREQQLLESLGNGTDFSVSSSASMDTVTSSSSSSLSVLPSSLSVFQNPTDVARSNPKSPQKPIVRVFLPNKQRTVVPARCGVTVRDSLKKALMMRGLIPECCAVYRIQDGEKKPIGWDTDISWLTGEELHVEVLENVPLTTHNFVRKTFFTLAFCDFCRKLLFQGFRCQTCGYKFHQRCSTEVPLMCVNYDQLDLLFVSKFFEHHPIPQEEASLAETALTSGSSPSAPASDSIGPQILTSPSPSKSIPIPQPFRPADEDHRNQFGQRDRSSSAPNVHINTIEPVNIDDLIRDQGFRGDGGSTTGLSATPPASLPGSLTNVKALQKSPGPQRERKSSSSSEDRNRMKTLGRRDSSDDWEIPDGQITVGQRIGSGSFETVYKGKWHGDVAVKMLNVTAPTPQQLQAFKNEVGVLRKTRHVNILLFMGYSTKPQLAIVTQWCEGSSLYHHLHIIETKFEMIKLIDIARQTAQGMDYLHAKSIIHRDLKSNNIFLHEDLTVKIGDFGLATVKSRWSGSHQFEQLSGSILWMAPEVIRMQDKNPYSFQSDVYAFGIVLYELMTGQLPYSNINNRDQIIFMVGRGYLSPDLSKVRSNCPKAMKRLMAECLKKKRDERPLFPQILASIELLARSLPKIHRSASEPSLNRAGFQTEDFSLYACASPKTPIQAGGYGAFPVH

SEQ ID NO: 105 - DNA, 2949 bp, Artificial sequence
  /note="Description of Artificial Sequence: mutated Homo sapiens BRAF, mutation BRAF_ G469V"
  CDS (62)..(2362)
cgcctcccttccccctccccgcccgacagcggccgctcgggccccggctctcggttataagatggcggcgctgagcggtggcggtggtggcggcgcggagccgggccaggctctgttcaacggggacatggagcccgaggccggcgccggcgccggcgccgcggcctcttcggctgcggaccctgccattccggaggaggtgtggaatatcaaacaaatgattaagttgacacaggaacatatagaggccctattggacaaatttggtggggagcataatccaccatcaatatatctggaggcctatgaagaatacaccagcaagctagatgcactccaacaaagagaacaacagttattggaatctctggggaacggaactgatttttctgtttctagctctgcatcaatggataccgttacatcttcttcctcttctagcctttcagtgctaccttcatctctttcagtttttcaaaatcccacagatgtggcacggagcaaccccaagtcaccacaaaaacctatcgttagagtcttcctgcccaacaaacagaggacagtggtacctgcaaggtgtggagttacagtccgagacagtctaaagaaagcactgatgatgagaggtctaatcccagagtgctgtgctgtttacagaattcaggatggagagaagaaaccaattggttgggacactgatatttcctggcttactggagaagaattgcatgtggaagtgttggagaatgttccacttacaacacacaactttgtacgaaaaacgtttttcaccttagcattttgtgacttttgtcgaaagctgcttttccagggtttccgctgtcaaacatgtggttataaatttcaccagcgttgtagtacagaagttccactgatgtgtgttaattatgaccaacttgatttgctgtttgtctccaagttctttgaacaccacccaataccacaggaagaggcgtccttagcagagactgccctaacatctggatcatccccttccgcacccgcctcggactctattgggccccaaattctcaccagtccgtctccttcaaaatccattccaattccacagcccttccgaccagcagatgaagatcatcgaaatcaatttgggcaacgagaccgatcctcatcagctcccaatgtgcatataaacacaatagaacctgtcaatattgatgacttgattagagaccaaggatttcgtggtgatggaggatcaaccacaggtttgtctgctaccccccctgcctcattacctggctcactaactaacgtgaaagccttacagaaatctccaggacctcagcgagaaaggaagtcatcttcatcctcagaagacaggaatcgaatgaaaacacttggtagacgggactcgagtgatgattgggagattcctgatgggcagattacagtgggacaaagaattggatctggatcatttgtaacagtctacaagggaaagtggcatggtgatgtggcagtgaaaatgttgaatgtgacagcacctacacctcagcagttacaagccttcaaaaatgaagtaggagtactcaggaaaacacgacatgtgaatatcctactcttcatgggctattccacaaagccacaactggctattgttacccagtggtgtgagggctccagcttgtatcaccatctccatatcattgagaccaaatttgagatgatcaaacttatagatattgcacgacagactgcacagggcatggattacttacacgccaagtcaatcatccacagagacctcaagagtaataatatatttcttcatgaagacctcacagtaaaaataggtgattttggtctagctacagtgaaatctcgatggagtgggtcccatcagtttgaacagttgtctggatccattttgtggatggcaccagaagtcatcagaatgcaagataaaaatccatacagctttcagtcagatgtatatgcatttggaattgttctgtatgaattgatgactggacagttaccttattcaaacatcaacaacagggaccagataatttttatggtgggacgaggatacctgtctccagatctcagtaaggtacggagtaactgtccaaaagccatgaagagattaatggcagagtgcctcaaaaagaaaagagatgagagaccactctttccccaaattctcgcctctattgagctgctggcccgctcattgccaaaaattcaccgcagtgcatcagaaccctccttgaatcgggctggtttccaaacagaggattttagtctatatgcttgtgcttctccaaaaacacccatccaggcagggggatatggtgcgtttcctgtccactgaaacaaatgagtgagagagttcaggagagtagcaacaaaaggaaaataaatgaacatatgtttgcttatatgttaaattgaataaaatactctctttttttttaaggtgaaccaaagaacacttgtgtggttaaagactagatataatttttccccaaactaaaatttatacttaacattggatttttaacatccaagggttaaaatacatagacattgctaaaaattggcagagcctcttctagaggctttactttctgttccgggtttgtatcattcacttggttattttaagtagtaaacttcagtttctcatgcaacttttgttgccagctatcacatgtccactagggactccagaagaagaccctacctatgcctgtgtttgcaggtgagaagttggcagtcggttagcctgggttagataaggcaaactgaacagatctaatttaggaagtcagtagaatttaataattctattattattcttaataatttttctataactatttctttttataacaatttggaaaatgtggatgtcttttatttccttgaagcaataaactaagtttctttttataaaaa

SEQ ID NO: 106 - protein, 766 aa, Artificial sequence
  Synthetic Construct
MAALSGGGGGGAEPGQALFNGDMEPEAGAGAGAAASSAADPAIPEEVWNIKQMIKLTQEHIEALLDKFGGEHNPPSIYLEAYEEYTSKLDALQQREQQLLESLGNGTDFSVSSSASMDTVTSSSSSSLSVLPSSLSVFQNPTDVARSNPKSPQKPIVRVFLPNKQRTVVPARCGVTVRDSLKKALMMRGLIPECCAVYRIQDGEKKPIGWDTDISWLTGEELHVEVLENVPLTTHNFVRKTFFTLAFCDFCRKLLFQGFRCQTCGYKFHQRCSTEVPLMCVNYDQLDLLFVSKFFEHHPIPQEEASLAETALTSGSSPSAPASDSIGPQILTSPSPSKSIPIPQPFRPADEDHRNQFGQRDRSSSAPNVHINTIEPVNIDDLIRDQGFRGDGGSTTGLSATPPASLPGSLTNVKALQKSPGPQRERKSSSSSEDRNRMKTLGRRDSSDDWEIPDGQITVGQRIGSGSFVTVYKGKWHGDVAVKMLNVTAPTPQQLQAFKNEVGVLRKTRHVNILLFMGYSTKPQLAIVTQWCEGSSLYHHLHIIETKFEMIKLIDIARQTAQGMDYLHAKSIIHRDLKSNNIFLHEDLTVKIGDFGLATVKSRWSGSHQFEQLSGSILWMAPEVIRMQDKNPYSFQSDVYAFGIVLYELMTGQLPYSNINNRDQIIFMVGRGYLSPDLSKVRSNCPKAMKRLMAECLKKKRDERPLFPQILASIELLARSLPKIHRSASEPSLNRAGFQTEDFSLYACASPKTPIQAGGYGAFPVH

SEQ ID NO: 107 - DNA, 2949 bp, Artificial sequence
  /note="Description of Artificial Sequence: mutated Homo sapiens BRAF, mutation BRAF_ F595L"
  CDS (62)..(2362)
cgcctcccttccccctccccgcccgacagcggccgctcgggccccggctctcggttataagatggcggcgctgagcggtggcggtggtggcggcgcggagccgggccaggctctgttcaacggggacatggagcccgaggccggcgccggcgccggcgccgcggcctcttcggctgcggaccctgccattccggaggaggtgtggaatatcaaacaaatgattaagttgacacaggaacatatagaggccctattggacaaatttggtggggagcataatccaccatcaatatatctggaggcctatgaagaatacaccagcaagctagatgcactccaacaaagagaacaacagttattggaatctctggggaacggaactgatttttctgtttctagctctgcatcaatggataccgttacatcttcttcctcttctagcctttcagtgctaccttcatctctttcagtttttcaaaatcccacagatgtggcacggagcaaccccaagtcaccacaaaaacctatcgttagagtcttcctgcccaacaaacagaggacagtggtacctgcaaggtgtggagttacagtccgagacagtctaaagaaagcactgatgatgagaggtctaatcccagagtgctgtgctgtttacagaattcaggatggagagaagaaaccaattggttgggacactgatatttcctggcttactggagaagaattgcatgtggaagtgttggagaatgttccacttacaacacacaactttgtacgaaaaacgtttttcaccttagcattttgtgacttttgtcgaaagctgcttttccagggtttccgctgtcaaacatgtggttataaatttcaccagcgttgtagtacagaagttccactgatgtgtgttaattatgaccaacttgatttgctgtttgtctccaagttctttgaacaccacccaataccacaggaagaggcgtccttagcagagactgccctaacatctggatcatccccttccgcacccgcctcggactctattgggccccaaattctcaccagtccgtctccttcaaaatccattccaattccacagcccttccgaccagcagatgaagatcatcgaaatcaatttgggcaacgagaccgatcctcatcagctcccaatgtgcatataaacacaatagaacctgtcaatattgatgacttgattagagaccaaggatttcgtggtgatggaggatcaaccacaggtttgtctgctaccccccctgcctcattacctggctcactaactaacgtgaaagccttacagaaatctccaggacctcagcgagaaaggaagtcatcttcatcctcagaagacaggaatcgaatgaaaacacttggtagacgggactcgagtgatgattgggagattcctgatgggcagattacagtgggacaaagaattggatctggatcatttggaacagtctacaagggaaagtggcatggtgatgtggcagtgaaaatgttgaatgtgacagcacctacacctcagcagttacaagccttcaaaaatgaagtaggagtactcaggaaaacacgacatgtgaatatcctactcttcatgggctattccacaaagccacaactggctattgttacccagtggtgtgagggctccagcttgtatcaccatctccatatcattgagaccaaatttgagatgatcaaacttatagatattgcacgacagactgcacagggcatggattacttacacgccaagtcaatcatccacagagacctcaagagtaataatatatttcttcatgaagacctcacagtaaaaataggtgatttgggtctagctacagtgaaatctcgatggagtgggtcccatcagtttgaacagttgtctggatccattttgtggatggcaccagaagtcatcagaatgcaagataaaaatccatacagctttcagtcagatgtatatgcatttggaattgttctgtatgaattgatgactggacagttaccttattcaaacatcaacaacagggaccagataatttttatggtgggacgaggatacctgtctccagatctcagtaaggtacggagtaactgtccaaaagccatgaagagattaatggcagagtgcctcaaaaagaaaagagatgagagaccactctttccccaaattctcgcctctattgagctgctggcccgctcattgccaaaaattcaccgcagtgcatcagaaccctccttgaatcgggctggtttccaaacagaggattttagtctatatgcttgtgcttctccaaaaacacccatccaggcagggggatatggtgcgtttcctgtccactgaaacaaatgagtgagagagttcaggagagtagcaacaaaaggaaaataaatgaacatatgtttgcttatatgttaaattgaataaaatactctctttttttttaaggtgaaccaaagaacacttgtgtggttaaagactagatataatttttccccaaactaaaatttatacttaacattggatttttaacatccaagggttaaaatacatagacattgctaaaaattggcagagcctcttctagaggctttactttctgttccgggtttgtatcattcacttggttattttaagtagtaaacttcagtttctcatgcaacttttgttgccagctatcacatgtccactagggactccagaagaagaccctacctatgcctgtgtttgcaggtgagaagttggcagtcggttagcctgggttagataaggcaaactgaacagatctaatttaggaagtcagtagaatttaataattctattattattcttaataatttttctataactatttctttttataacaatttggaaaatgtggatgtcttttatttccttgaagcaataaactaagtttctttttataaaaa

SEQ ID NO: 108 - protein, 766 aa, Artificial sequence
  Synthetic Construct
MAALSGGGGGGAEPGQALFNGDMEPEAGAGAGAAASSAADPAIPEEVWNIKQMIKLTQEHIEALLDKFGGEHNPPSIYLEAYEEYTSKLDALQQREQQLLESLGNGTDFSVSSSASMDTVTSSSSSSLSVLPSSLSVFQNPTDVARSNPKSPQKPIVRVFLPNKQRTVVPARCGVTVRDSLKKALMMRGLIPECCAVYRIQDGEKKPIGWDTDISWLTGEELHVEVLENVPLTTHNFVRKTFFTLAFCDFCRKLLFQGFRCQTCGYKFHQRCSTEVPLMCVNYDQLDLLFVSKFFEHHPIPQEEASLAETALTSGSSPSAPASDSIGPQILTSPSPSKSIPIPQPFRPADEDHRNQFGQRDRSSSAPNVHINTIEPVNIDDLIRDQGFRGDGGSTTGLSATPPASLPGSLTNVKALQKSPGPQRERKSSSSSEDRNRMKTLGRRDSSDDWEIPDGQITVGQRIGSGSFGTVYKGKWHGDVAVKMLNVTAPTPQQLQAFKNEVGVLRKTRHVNILLFMGYSTKPQLAIVTQWCEGSSLYHHLHIIETKFEMIKLIDIARQTAQGMDYLHAKSIIHRDLKSNNIFLHEDLTVKIGDLGLATVKSRWSGSHQFEQLSGSILWMAPEVIRMQDKNPYSFQSDVYAFGIVLYELMTGQLPYSNINNRDQIIFMVGRGYLSPDLSKVRSNCPKAMKRLMAECLKKKRDERPLFPQILASIELLARSLPKIHRSASEPSLNRAGFQTEDFSLYACASPKTPIQAGGYGAFPVH

SEQ ID NO: 109 - DNA, 2949 bp, Artificial sequence
  /note="Description of Artificial Sequence: mutated Homo sapiens BRAF, mutation BRAF_ G596R"
  CDS (62)..(2362)
cgcctcccttccccctccccgcccgacagcggccgctcgggccccggctctcggttataagatggcggcgctgagcggtggcggtggtggcggcgcggagccgggccaggctctgttcaacggggacatggagcccgaggccggcgccggcgccggcgccgcggcctcttcggctgcggaccctgccattccggaggaggtgtggaatatcaaacaaatgattaagttgacacaggaacatatagaggccctattggacaaatttggtggggagcataatccaccatcaatatatctggaggcctatgaagaatacaccagcaagctagatgcactccaacaaagagaacaacagttattggaatctctggggaacggaactgatttttctgtttctagctctgcatcaatggataccgttacatcttcttcctcttctagcctttcagtgctaccttcatctctttcagtttttcaaaatcccacagatgtggcacggagcaaccccaagtcaccacaaaaacctatcgttagagtcttcctgcccaacaaacagaggacagtggtacctgcaaggtgtggagttacagtccgagacagtctaaagaaagcactgatgatgagaggtctaatcccagagtgctgtgctgtttacagaattcaggatggagagaagaaaccaattggttgggacactgatatttcctggcttactggagaagaattgcatgtggaagtgttggagaatgttccacttacaacacacaactttgtacgaaaaacgtttttcaccttagcattttgtgacttttgtcgaaagctgcttttccagggtttccgctgtcaaacatgtggttataaatttcaccagcgttgtagtacagaagttccactgatgtgtgttaattatgaccaacttgatttgctgtttgtctccaagttctttgaacaccacccaataccacaggaagaggcgtccttagcagagactgccctaacatctggatcatccccttccgcacccgcctcggactctattgggccccaaattctcaccagtccgtctccttcaaaatccattccaattccacagcccttccgaccagcagatgaagatcatcgaaatcaatttgggcaacgagaccgatcctcatcagctcccaatgtgcatataaacacaatagaacctgtcaatattgatgacttgattagagaccaaggatttcgtggtgatggaggatcaaccacaggtttgtctgctaccccccctgcctcattacctggctcactaactaacgtgaaagccttacagaaatctccaggacctcagcgagaaaggaagtcatcttcatcctcagaagacaggaatcgaatgaaaacacttggtagacgggactcgagtgatgattgggagattcctgatgggcagattacagtgggacaaagaattggatctggatcatttggaacagtctacaagggaaagtggcatggtgatgtggcagtgaaaatgttgaatgtgacagcacctacacctcagcagttacaagccttcaaaaatgaagtaggagtactcaggaaaacacgacatgtgaatatcctactcttcatgggctattccacaaagccacaactggctattgttacccagtggtgtgagggctccagcttgtatcaccatctccatatcattgagaccaaatttgagatgatcaaacttatagatattgcacgacagactgcacagggcatggattacttacacgccaagtcaatcatccacagagacctcaagagtaataatatatttcttcatgaagacctcacagtaaaaataggtgattttcgtctagctacagtgaaatctcgatggagtgggtcccatcagtttgaacagttgtctggatccattttgtggatggcaccagaagtcatcagaatgcaagataaaaatccatacagctttcagtcagatgtatatgcatttggaattgttctgtatgaattgatgactggacagttaccttattcaaacatcaacaacagggaccagataatttttatggtgggacgaggatacctgtctccagatctcagtaaggtacggagtaactgtccaaaagccatgaagagattaatggcagagtgcctcaaaaagaaaagagatgagagaccactctttccccaaattctcgcctctattgagctgctggcccgctcattgccaaaaattcaccgcagtgcatcagaaccctccttgaatcgggctggtttccaaacagaggattttagtctatatgcttgtgcttctccaaaaacacccatccaggcagggggatatggtgcgtttcctgtccactgaaacaaatgagtgagagagttcaggagagtagcaacaaaaggaaaataaatgaacatatgtttgcttatatgttaaattgaataaaatactctctttttttttaaggtgaaccaaagaacacttgtgtggttaaagactagatataatttttccccaaactaaaatttatacttaacattggatttttaacatccaagggttaaaatacatagacattgctaaaaattggcagagcctcttctagaggctttactttctgttccgggtttgtatcattcacttggttattttaagtagtaaacttcagtttctcatgcaacttttgttgccagctatcacatgtccactagggactccagaagaagaccctacctatgcctgtgtttgcaggtgagaagttggcagtcggttagcctgggttagataaggcaaactgaacagatctaatttaggaagtcagtagaatttaataattctattattattcttaataatttttctataactatttctttttataacaatttggaaaatgtggatgtcttttatttccttgaagcaataaactaagtttctttttataaaaa

SEQ ID NO: 110 - protein, 766 aa, Artificial sequence
  Synthetic Construct
MAALSGGGGGGAEPGQALFNGDMEPEAGAGAGAAASSAADPAIPEEVWNIKQMIKLTQEHIEALLDKFGGEHNPPSIYLEAYEEYTSKLDALQQREQQLLESLGNGTDFSVSSSASMDTVTSSSSSSLSVLPSSLSVFQNPTDVARSNPKSPQKPIVRVFLPNKQRTVVPARCGVTVRDSLKKALMMRGLIPECCAVYRIQDGEKKPIGWDTDISWLTGEELHVEVLENVPLTTHNFVRKTFFTLAFCDFCRKLLFQGFRCQTCGYKFHQRCSTEVPLMCVNYDQLDLLFVSKFFEHHPIPQEEASLAETALTSGSSPSAPASDSIGPQILTSPSPSKSIPIPQPFRPADEDHRNQFGQRDRSSSAPNVHINTIEPVNIDDLIRDQGFRGDGGSTTGLSATPPASLPGSLTNVKALQKSPGPQRERKSSSSSEDRNRMKTLGRRDSSDDWEIPDGQITVGQRIGSGSFGTVYKGKWHGDVAVKMLNVTAPTPQQLQAFKNEVGVLRKTRHVNILLFMGYSTKPQLAIVTQWCEGSSLYHHLHIIETKFEMIKLIDIARQTAQGMDYLHAKSIIHRDLKSNNIFLHEDLTVKIGDFRLATVKSRWSGSHQFEQLSGSILWMAPEVIRMQDKNPYSFQSDVYAFGIVLYELMTGQLPYSNINNRDQIIFMVGRGYLSPDLSKVRSNCPKAMKRLMAECLKKKRDERPLFPQILASIELLARSLPKIHRSASEPSLNRAGFQTEDFSLYACASPKTPIQAGGYGAFPVH

SEQ ID NO: 111 - DNA, 2949 bp, Artificial sequence
  /note="Description of Artificial Sequence: mutated Homo sapiens BRAF, mutation BRAF_ L597V"
  CDS (62)..(2362)
cgcctcccttccccctccccgcccgacagcggccgctcgggccccggctctcggttataagatggcggcgctgagcggtggcggtggtggcggcgcggagccgggccaggctctgttcaacggggacatggagcccgaggccggcgccggcgccggcgccgcggcctcttcggctgcggaccctgccattccggaggaggtgtggaatatcaaacaaatgattaagttgacacaggaacatatagaggccctattggacaaatttggtggggagcataatccaccatcaatatatctggaggcctatgaagaatacaccagcaagctagatgcactccaacaaagagaacaacagttattggaatctctggggaacggaactgatttttctgtttctagctctgcatcaatggataccgttacatcttcttcctcttctagcctttcagtgctaccttcatctctttcagtttttcaaaatcccacagatgtggcacggagcaaccccaagtcaccacaaaaacctatcgttagagtcttcctgcccaacaaacagaggacagtggtacctgcaaggtgtggagttacagtccgagacagtctaaagaaagcactgatgatgagaggtctaatcccagagtgctgtgctgtttacagaattcaggatggagagaagaaaccaattggttgggacactgatatttcctggcttactggagaagaattgcatgtggaagtgttggagaatgttccacttacaacacacaactttgtacgaaaaacgtttttcaccttagcattttgtgacttttgtcgaaagctgcttttccagggtttccgctgtcaaacatgtggttataaatttcaccagcgttgtagtacagaagttccactgatgtgtgttaattatgaccaacttgatttgctgtttgtctccaagttctttgaacaccacccaataccacaggaagaggcgtccttagcagagactgccctaacatctggatcatccccttccgcacccgcctcggactctattgggccccaaattctcaccagtccgtctccttcaaaatccattccaattccacagcccttccgaccagcagatgaagatcatcgaaatcaatttgggcaacgagaccgatcctcatcagctcccaatgtgcatataaacacaatagaacctgtcaatattgatgacttgattagagaccaaggatttcgtggtgatggaggatcaaccacaggtttgtctgctaccccccctgcctcattacctggctcactaactaacgtgaaagccttacagaaatctccaggacctcagcgagaaaggaagtcatcttcatcctcagaagacaggaatcgaatgaaaacacttggtagacgggactcgagtgatgattgggagattcctgatgggcagattacagtgggacaaagaattggatctggatcatttggaacagtctacaagggaaagtggcatggtgatgtggcagtgaaaatgttgaatgtgacagcacctacacctcagcagttacaagccttcaaaaatgaagtaggagtactcaggaaaacacgacatgtgaatatcctactcttcatgggctattccacaaagccacaactggctattgttacccagtggtgtgagggctccagcttgtatcaccatctccatatcattgagaccaaatttgagatgatcaaacttatagatattgcacgacagactgcacagggcatggattacttacacgccaagtcaatcatccacagagacctcaagagtaataatatatttcttcatgaagacctcacagtaaaaataggtgattttggtgtagctacagtgaaatctcgatggagtgggtcccatcagtttgaacagttgtctggatccattttgtggatggcaccagaagtcatcagaatgcaagataaaaatccatacagctttcagtcagatgtatatgcatttggaattgttctgtatgaattgatgactggacagttaccttattcaaacatcaacaacagggaccagataatttttatggtgggacgaggatacctgtctccagatctcagtaaggtacggagtaactgtccaaaagccatgaagagattaatggcagagtgcctcaaaaagaaaagagatgagagaccactctttccccaaattctcgcctctattgagctgctggcccgctcattgccaaaaattcaccgcagtgcatcagaaccctccttgaatcgggctggtttccaaacagaggattttagtctatatgcttgtgcttctccaaaaacacccatccaggcagggggatatggtgcgtttcctgtccactgaaacaaatgagtgagagagttcaggagagtagcaacaaaaggaaaataaatgaacatatgtttgcttatatgttaaattgaataaaatactctctttttttttaaggtgaaccaaagaacacttgtgtggttaaagactagatataatttttccccaaactaaaatttatacttaacattggatttttaacatccaagggttaaaatacatagacattgctaaaaattggcagagcctcttctagaggctttactttctgttccgggtttgtatcattcacttggttattttaagtagtaaacttcagtttctcatgcaacttttgttgccagctatcacatgtccactagggactccagaagaagaccctacctatgcctgtgtttgcaggtgagaagttggcagtcggttagcctgggttagataaggcaaactgaacagatctaatttaggaagtcagtagaatttaataattctattattattcttaataatttttctataactatttctttttataacaatttggaaaatgtggatgtcttttatttccttgaagcaataaactaagtttctttttataaaaa

SEQ ID NO: 112 - protein, 766 aa, Artificial sequence
  Synthetic Construct
MAALSGGGGGGAEPGQALFNGDMEPEAGAGAGAAASSAADPAIPEEVWNIKQMIKLTQEHIEALLDKFGGEHNPPSIYLEAYEEYTSKLDALQQREQQLLESLGNGTDFSVSSSASMDTVTSSSSSSLSVLPSSLSVFQNPTDVARSNPKSPQKPIVRVFLPNKQRTVVPARCGVTVRDSLKKALMMRGLIPECCAVYRIQDGEKKPIGWDTDISWLTGEELHVEVLENVPLTTHNFVRKTFFTLAFCDFCRKLLFQGFRCQTCGYKFHQRCSTEVPLMCVNYDQLDLLFVSKFFEHHPIPQEEASLAETALTSGSSPSAPASDSIGPQILTSPSPSKSIPIPQPFRPADEDHRNQFGQRDRSSSAPNVHINTIEPVNIDDLIRDQGFRGDGGSTTGLSATPPASLPGSLTNVKALQKSPGPQRERKSSSSSEDRNRMKTLGRRDSSDDWEIPDGQITVGQRIGSGSFGTVYKGKWHGDVAVKMLNVTAPTPQQLQAFKNEVGVLRKTRHVNILLFMGYSTKPQLAIVTQWCEGSSLYHHLHIIETKFEMIKLIDIARQTAQGMDYLHAKSIIHRDLKSNNIFLHEDLTVKIGDFGVATVKSRWSGSHQFEQLSGSILWMAPEVIRMQDKNPYSFQSDVYAFGIVLYELMTGQLPYSNINNRDQIIFMVGRGYLSPDLSKVRSNCPKAMKRLMAECLKKKRDERPLFPQILASIELLARSLPKIHRSASEPSLNRAGFQTEDFSLYACASPKTPIQAGGYGAFPVH

SEQ ID NO: 113 - DNA, 2949 bp, Artificial sequence
  /note="Description of Artificial Sequence: mutated Homo sapiens BRAF, mutation BRAF_ L597S"
  CDS (62)..(2362)
cgcctcccttccccctccccgcccgacagcggccgctcgggccccggctctcggttataagatggcggcgctgagcggtggcggtggtggcggcgcggagccgggccaggctctgttcaacggggacatggagcccgaggccggcgccggcgccggcgccgcggcctcttcggctgcggaccctgccattccggaggaggtgtggaatatcaaacaaatgattaagttgacacaggaacatatagaggccctattggacaaatttggtggggagcataatccaccatcaatatatctggaggcctatgaagaatacaccagcaagctagatgcactccaacaaagagaacaacagttattggaatctctggggaacggaactgatttttctgtttctagctctgcatcaatggataccgttacatcttcttcctcttctagcctttcagtgctaccttcatctctttcagtttttcaaaatcccacagatgtggcacggagcaaccccaagtcaccacaaaaacctatcgttagagtcttcctgcccaacaaacagaggacagtggtacctgcaaggtgtggagttacagtccgagacagtctaaagaaagcactgatgatgagaggtctaatcccagagtgctgtgctgtttacagaattcaggatggagagaagaaaccaattggttgggacactgatatttcctggcttactggagaagaattgcatgtggaagtgttggagaatgttccacttacaacacacaactttgtacgaaaaacgtttttcaccttagcattttgtgacttttgtcgaaagctgcttttccagggtttccgctgtcaaacatgtggttataaatttcaccagcgttgtagtacagaagttccactgatgtgtgttaattatgaccaacttgatttgctgtttgtctccaagttctttgaacaccacccaataccacaggaagaggcgtccttagcagagactgccctaacatctggatcatccccttccgcacccgcctcggactctattgggccccaaattctcaccagtccgtctccttcaaaatccattccaattccacagcccttccgaccagcagatgaagatcatcgaaatcaatttgggcaacgagaccgatcctcatcagctcccaatgtgcatataaacacaatagaacctgtcaatattgatgacttgattagagaccaaggatttcgtggtgatggaggatcaaccacaggtttgtctgctaccccccctgcctcattacctggctcactaactaacgtgaaagccttacagaaatctccaggacctcagcgagaaaggaagtcatcttcatcctcagaagacaggaatcgaatgaaaacacttggtagacgggactcgagtgatgattgggagattcctgatgggcagattacagtgggacaaagaattggatctggatcatttggaacagtctacaagggaaagtggcatggtgatgtggcagtgaaaatgttgaatgtgacagcacctacacctcagcagttacaagccttcaaaaatgaagtaggagtactcaggaaaacacgacatgtgaatatcctactcttcatgggctattccacaaagccacaactggctattgttacccagtggtgtgagggctccagcttgtatcaccatctccatatcattgagaccaaatttgagatgatcaaacttatagatattgcacgacagactgcacagggcatggattacttacacgccaagtcaatcatccacagagacctcaagagtaataatatatttcttcatgaagacctcacagtaaaaataggtgattttggttcagctacagtgaaatctcgatggagtgggtcccatcagtttgaacagttgtctggatccattttgtggatggcaccagaagtcatcagaatgcaagataaaaatccatacagctttcagtcagatgtatatgcatttggaattgttctgtatgaattgatgactggacagttaccttattcaaacatcaacaacagggaccagataatttttatggtgggacgaggatacctgtctccagatctcagtaaggtacggagtaactgtccaaaagccatgaagagattaatggcagagtgcctcaaaaagaaaagagatgagagaccactctttccccaaattctcgcctctattgagctgctggcccgctcattgccaaaaattcaccgcagtgcatcagaaccctccttgaatcgggctggtttccaaacagaggattttagtctatatgcttgtgcttctccaaaaacacccatccaggcagggggatatggtgcgtttcctgtccactgaaacaaatgagtgagagagttcaggagagtagcaacaaaaggaaaataaatgaacatatgtttgcttatatgttaaattgaataaaatactctctttttttttaaggtgaaccaaagaacacttgtgtggttaaagactagatataatttttccccaaactaaaatttatacttaacattggatttttaacatccaagggttaaaatacatagacattgctaaaaattggcagagcctcttctagaggctttactttctgttccgggtttgtatcattcacttggttattttaagtagtaaacttcagtttctcatgcaacttttgttgccagctatcacatgtccactagggactccagaagaagaccctacctatgcctgtgtttgcaggtgagaagttggcagtcggttagcctgggttagataaggcaaactgaacagatctaatttaggaagtcagtagaatttaataattctattattattcttaataatttttctataactatttctttttataacaatttggaaaatgtggatgtcttttatttccttgaagcaataaactaagtttctttttataaaaa

SEQ ID NO: 114 - protein, 766 aa, Artificial sequence
  Synthetic Construct
MAALSGGGGGGAEPGQALFNGDMEPEAGAGAGAAASSAADPAIPEEVWNIKQMIKLTQEHIEALLDKFGGEHNPPSIYLEAYEEYTSKLDALQQREQQLLESLGNGTDFSVSSSASMDTVTSSSSSSLSVLPSSLSVFQNPTDVARSNPKSPQKPIVRVFLPNKQRTVVPARCGVTVRDSLKKALMMRGLIPECCAVYRIQDGEKKPIGWDTDISWLTGEELHVEVLENVPLTTHNFVRKTFFTLAFCDFCRKLLFQGFRCQTCGYKFHQRCSTEVPLMCVNYDQLDLLFVSKFFEHHPIPQEEASLAETALTSGSSPSAPASDSIGPQILTSPSPSKSIPIPQPFRPADEDHRNQFGQRDRSSSAPNVHINTIEPVNIDDLIRDQGFRGDGGSTTGLSATPPASLPGSLTNVKALQKSPGPQRERKSSSSSEDRNRMKTLGRRDSSDDWEIPDGQITVGQRIGSGSFGTVYKGKWHGDVAVKMLNVTAPTPQQLQAFKNEVGVLRKTRHVNILLFMGYSTKPQLAIVTQWCEGSSLYHHLHIIETKFEMIKLIDIARQTAQGMDYLHAKSIIHRDLKSNNIFLHEDLTVKIGDFGSATVKSRWSGSHQFEQLSGSILWMAPEVIRMQDKNPYSFQSDVYAFGIVLYELMTGQLPYSNINNRDQIIFMVGRGYLSPDLSKVRSNCPKAMKRLMAECLKKKRDERPLFPQILASIELLARSLPKIHRSASEPSLNRAGFQTEDFSLYACASPKTPIQAGGYGAFPVH

SEQ ID NO: 115 - DNA, 2949 bp, Artificial sequence
  /note="Description of Artificial Sequence: mutated Homo sapiens BRAF, mutation BRAF_ V600E"
  CDS (62)..(2362)
cgcctcccttccccctccccgcccgacagcggccgctcgggccccggctctcggttataagatggcggcgctgagcggtggcggtggtggcggcgcggagccgggccaggctctgttcaacggggacatggagcccgaggccggcgccggcgccggcgccgcggcctcttcggctgcggaccctgccattccggaggaggtgtggaatatcaaacaaatgattaagttgacacaggaacatatagaggccctattggacaaatttggtggggagcataatccaccatcaatatatctggaggcctatgaagaatacaccagcaagctagatgcactccaacaaagagaacaacagttattggaatctctggggaacggaactgatttttctgtttctagctctgcatcaatggataccgttacatcttcttcctcttctagcctttcagtgctaccttcatctctttcagtttttcaaaatcccacagatgtggcacggagcaaccccaagtcaccacaaaaacctatcgttagagtcttcctgcccaacaaacagaggacagtggtacctgcaaggtgtggagttacagtccgagacagtctaaagaaagcactgatgatgagaggtctaatcccagagtgctgtgctgtttacagaattcaggatggagagaagaaaccaattggttgggacactgatatttcctggcttactggagaagaattgcatgtggaagtgttggagaatgttccacttacaacacacaactttgtacgaaaaacgtttttcaccttagcattttgtgacttttgtcgaaagctgcttttccagggtttccgctgtcaaacatgtggttataaatttcaccagcgttgtagtacagaagttccactgatgtgtgttaattatgaccaacttgatttgctgtttgtctccaagttctttgaacaccacccaataccacaggaagaggcgtccttagcagagactgccctaacatctggatcatccccttccgcacccgcctcggactctattgggccccaaattctcaccagtccgtctccttcaaaatccattccaattccacagcccttccgaccagcagatgaagatcatcgaaatcaatttgggcaacgagaccgatcctcatcagctcccaatgtgcatataaacacaatagaacctgtcaatattgatgacttgattagagaccaaggatttcgtggtgatggaggatcaaccacaggtttgtctgctaccccccctgcctcattacctggctcactaactaacgtgaaagccttacagaaatctccaggacctcagcgagaaaggaagtcatcttcatcctcagaagacaggaatcgaatgaaaacacttggtagacgggactcgagtgatgattgggagattcctgatgggcagattacagtgggacaaagaattggatctggatcatttggaacagtctacaagggaaagtggcatggtgatgtggcagtgaaaatgttgaatgtgacagcacctacacctcagcagttacaagccttcaaaaatgaagtaggagtactcaggaaaacacgacatgtgaatatcctactcttcatgggctattccacaaagccacaactggctattgttacccagtggtgtgagggctccagcttgtatcaccatctccatatcattgagaccaaatttgagatgatcaaacttatagatattgcacgacagactgcacagggcatggattacttacacgccaagtcaatcatccacagagacctcaagagtaataatatatttcttcatgaagacctcacagtaaaaataggtgattttggtctagctacagagaaatctcgatggagtgggtcccatcagtttgaacagttgtctggatccattttgtggatggcaccagaagtcatcagaatgcaagataaaaatccatacagctttcagtcagatgtatatgcatttggaattgttctgtatgaattgatgactggacagttaccttattcaaacatcaacaacagggaccagataatttttatggtgggacgaggatacctgtctccagatctcagtaaggtacggagtaactgtccaaaagccatgaagagattaatggcagagtgcctcaaaaagaaaagagatgagagaccactctttccccaaattctcgcctctattgagctgctggcccgctcattgccaaaaattcaccgcagtgcatcagaaccctccttgaatcgggctggtttccaaacagaggattttagtctatatgcttgtgcttctccaaaaacacccatccaggcagggggatatggtgcgtttcctgtccactgaaacaaatgagtgagagagttcaggagagtagcaacaaaaggaaaataaatgaacatatgtttgcttatatgttaaattgaataaaatactctctttttttttaaggtgaaccaaagaacacttgtgtggttaaagactagatataatttttccccaaactaaaatttatacttaacattggatttttaacatccaagggttaaaatacatagacattgctaaaaattggcagagcctcttctagaggctttactttctgttccgggtttgtatcattcacttggttattttaagtagtaaacttcagtttctcatgcaacttttgttgccagctatcacatgtccactagggactccagaagaagaccctacctatgcctgtgtttgcaggtgagaagttggcagtcggttagcctgggttagataaggcaaactgaacagatctaatttaggaagtcagtagaatttaataattctattattattcttaataatttttctataactatttctttttataacaatttggaaaatgtggatgtcttttatttccttgaagcaataaactaagtttctttttataaaaa

SEQ ID NO: 116 - protein, 766 aa, Artificial sequence
  Synthetic Construct
MAALSGGGGGGAEPGQALFNGDMEPEAGAGAGAAASSAADPAIPEEVWNIKQMIKLTQEHIEALLDKFGGEHNPPSIYLEAYEEYTSKLDALQQREQQLLESLGNGTDFSVSSSASMDTVTSSSSSSLSVLPSSLSVFQNPTDVARSNPKSPQKPIVRVFLPNKQRTVVPARCGVTVRDSLKKALMMRGLIPECCAVYRIQDGEKKPIGWDTDISWLTGEELHVEVLENVPLTTHNFVRKTFFTLAFCDFCRKLLFQGFRCQTCGYKFHQRCSTEVPLMCVNYDQLDLLFVSKFFEHHPIPQEEASLAETALTSGSSPSAPASDSIGPQILTSPSPSKSIPIPQPFRPADEDHRNQFGQRDRSSSAPNVHINTIEPVNIDDLIRDQGFRGDGGSTTGLSATPPASLPGSLTNVKALQKSPGPQRERKSSSSSEDRNRMKTLGRRDSSDDWEIPDGQITVGQRIGSGSFGTVYKGKWHGDVAVKMLNVTAPTPQQLQAFKNEVGVLRKTRHVNILLFMGYSTKPQLAIVTQWCEGSSLYHHLHIIETKFEMIKLIDIARQTAQGMDYLHAKSIIHRDLKSNNIFLHEDLTVKIGDFGLATEKSRWSGSHQFEQLSGSILWMAPEVIRMQDKNPYSFQSDVYAFGIVLYELMTGQLPYSNINNRDQIIFMVGRGYLSPDLSKVRSNCPKAMKRLMAECLKKKRDERPLFPQILASIELLARSLPKIHRSASEPSLNRAGFQTEDFSLYACASPKTPIQAGGYGAFPVH

SEQ ID NO: 117 - DNA, 2949 bp, Artificial sequence
  /note="Description of Artificial Sequence: mutated Homo sapiens BRAF, mutation BRAF_ V600K"
  CDS (62)..(2362)
cgcctcccttccccctccccgcccgacagcggccgctcgggccccggctctcggttataagatggcggcgctgagcggtggcggtggtggcggcgcggagccgggccaggctctgttcaacggggacatggagcccgaggccggcgccggcgccggcgccgcggcctcttcggctgcggaccctgccattccggaggaggtgtggaatatcaaacaaatgattaagttgacacaggaacatatagaggccctattggacaaatttggtggggagcataatccaccatcaatatatctggaggcctatgaagaatacaccagcaagctagatgcactccaacaaagagaacaacagttattggaatctctggggaacggaactgatttttctgtttctagctctgcatcaatggataccgttacatcttcttcctcttctagcctttcagtgctaccttcatctctttcagtttttcaaaatcccacagatgtggcacggagcaaccccaagtcaccacaaaaacctatcgttagagtcttcctgcccaacaaacagaggacagtggtacctgcaaggtgtggagttacagtccgagacagtctaaagaaagcactgatgatgagaggtctaatcccagagtgctgtgctgtttacagaattcaggatggagagaagaaaccaattggttgggacactgatatttcctggcttactggagaagaattgcatgtggaagtgttggagaatgttccacttacaacacacaactttgtacgaaaaacgtttttcaccttagcattttgtgacttttgtcgaaagctgcttttccagggtttccgctgtcaaacatgtggttataaatttcaccagcgttgtagtacagaagttccactgatgtgtgttaattatgaccaacttgatttgctgtttgtctccaagttctttgaacaccacccaataccacaggaagaggcgtccttagcagagactgccctaacatctggatcatccccttccgcacccgcctcggactctattgggccccaaattctcaccagtccgtctccttcaaaatccattccaattccacagcccttccgaccagcagatgaagatcatcgaaatcaatttgggcaacgagaccgatcctcatcagctcccaatgtgcatataaacacaatagaacctgtcaatattgatgacttgattagagaccaaggatttcgtggtgatggaggatcaaccacaggtttgtctgctaccccccctgcctcattacctggctcactaactaacgtgaaagccttacagaaatctccaggacctcagcgagaaaggaagtcatcttcatcctcagaagacaggaatcgaatgaaaacacttggtagacgggactcgagtgatgattgggagattcctgatgggcagattacagtgggacaaagaattggatctggatcatttggaacagtctacaagggaaagtggcatggtgatgtggcagtgaaaatgttgaatgtgacagcacctacacctcagcagttacaagccttcaaaaatgaagtaggagtactcaggaaaacacgacatgtgaatatcctactcttcatgggctattccacaaagccacaactggctattgttacccagtggtgtgagggctccagcttgtatcaccatctccatatcattgagaccaaatttgagatgatcaaacttatagatattgcacgacagactgcacagggcatggattacttacacgccaagtcaatcatccacagagacctcaagagtaataatatatttcttcatgaagacctcacagtaaaaataggtgattttggtctagctacaaagaaatctcgatggagtgggtcccatcagtttgaacagttgtctggatccattttgtggatggcaccagaagtcatcagaatgcaagataaaaatccatacagctttcagtcagatgtatatgcatttggaattgttctgtatgaattgatgactggacagttaccttattcaaacatcaacaacagggaccagataatttttatggtgggacgaggatacctgtctccagatctcagtaaggtacggagtaactgtccaaaagccatgaagagattaatggcagagtgcctcaaaaagaaaagagatgagagaccactctttccccaaattctcgcctctattgagctgctggcccgctcattgccaaaaattcaccgcagtgcatcagaaccctccttgaatcgggctggtttccaaacagaggattttagtctatatgcttgtgcttctccaaaaacacccatccaggcagggggatatggtgcgtttcctgtccactgaaacaaatgagtgagagagttcaggagagtagcaacaaaaggaaaataaatgaacatatgtttgcttatatgttaaattgaataaaatactctctttttttttaaggtgaaccaaagaacacttgtgtggttaaagactagatataatttttccccaaactaaaatttatacttaacattggatttttaacatccaagggttaaaatacatagacattgctaaaaattggcagagcctcttctagaggctttactttctgttccgggtttgtatcattcacttggttattttaagtagtaaacttcagtttctcatgcaacttttgttgccagctatcacatgtccactagggactccagaagaagaccctacctatgcctgtgtttgcaggtgagaagttggcagtcggttagcctgggttagataaggcaaactgaacagatctaatttaggaagtcagtagaatttaataattctattattattcttaataatttttctataactatttctttttataacaatttggaaaatgtggatgtcttttatttccttgaagcaataaactaagtttctttttataaaaa

SEQ ID NO: 118 - protein, 766 aa, Artificial sequence
  Synthetic Construct
MAALSGGGGGGAEPGQALFNGDMEPEAGAGAGAAASSAADPAIPEEVWNIKQMIKLTQEHIEALLDKFGGEHNPPSIYLEAYEEYTSKLDALQQREQQLLESLGNGTDFSVSSSASMDTVTSSSSSSLSVLPSSLSVFQNPTDVARSNPKSPQKPIVRVFLPNKQRTVVPARCGVTVRDSLKKALMMRGLIPECCAVYRIQDGEKKPIGWDTDISWLTGEELHVEVLENVPLTTHNFVRKTFFTLAFCDFCRKLLFQGFRCQTCGYKFHQRCSTEVPLMCVNYDQLDLLFVSKFFEHHPIPQEEASLAETALTSGSSPSAPASDSIGPQILTSPSPSKSIPIPQPFRPADEDHRNQFGQRDRSSSAPNVHINTIEPVNIDDLIRDQGFRGDGGSTTGLSATPPASLPGSLTNVKALQKSPGPQRERKSSSSSEDRNRMKTLGRRDSSDDWEIPDGQITVGQRIGSGSFGTVYKGKWHGDVAVKMLNVTAPTPQQLQAFKNEVGVLRKTRHVNILLFMGYSTKPQLAIVTQWCEGSSLYHHLHIIETKFEMIKLIDIARQTAQGMDYLHAKSIIHRDLKSNNIFLHEDLTVKIGDFGLATKKSRWSGSHQFEQLSGSILWMAPEVIRMQDKNPYSFQSDVYAFGIVLYELMTGQLPYSNINNRDQIIFMVGRGYLSPDLSKVRSNCPKAMKRLMAECLKKKRDERPLFPQILASIELLARSLPKIHRSASEPSLNRAGFQTEDFSLYACASPKTPIQAGGYGAFPVH

SEQ ID NO: 119 - DNA, 2949 bp, Artificial sequence
  /note="Description of Artificial Sequence: mutated Homo sapiens BRAF, mutation BRAF_ V600R"
  CDS (62)..(2362)
cgcctcccttccccctccccgcccgacagcggccgctcgggccccggctctcggttataagatggcggcgctgagcggtggcggtggtggcggcgcggagccgggccaggctctgttcaacggggacatggagcccgaggccggcgccggcgccggcgccgcggcctcttcggctgcggaccctgccattccggaggaggtgtggaatatcaaacaaatgattaagttgacacaggaacatatagaggccctattggacaaatttggtggggagcataatccaccatcaatatatctggaggcctatgaagaatacaccagcaagctagatgcactccaacaaagagaacaacagttattggaatctctggggaacggaactgatttttctgtttctagctctgcatcaatggataccgttacatcttcttcctcttctagcctttcagtgctaccttcatctctttcagtttttcaaaatcccacagatgtggcacggagcaaccccaagtcaccacaaaaacctatcgttagagtcttcctgcccaacaaacagaggacagtggtacctgcaaggtgtggagttacagtccgagacagtctaaagaaagcactgatgatgagaggtctaatcccagagtgctgtgctgtttacagaattcaggatggagagaagaaaccaattggttgggacactgatatttcctggcttactggagaagaattgcatgtggaagtgttggagaatgttccacttacaacacacaactttgtacgaaaaacgtttttcaccttagcattttgtgacttttgtcgaaagctgcttttccagggtttccgctgtcaaacatgtggttataaatttcaccagcgttgtagtacagaagttccactgatgtgtgttaattatgaccaacttgatttgctgtttgtctccaagttctttgaacaccacccaataccacaggaagaggcgtccttagcagagactgccctaacatctggatcatccccttccgcacccgcctcggactctattgggccccaaattctcaccagtccgtctccttcaaaatccattccaattccacagcccttccgaccagcagatgaagatcatcgaaatcaatttgggcaacgagaccgatcctcatcagctcccaatgtgcatataaacacaatagaacctgtcaatattgatgacttgattagagaccaaggatttcgtggtgatggaggatcaaccacaggtttgtctgctaccccccctgcctcattacctggctcactaactaacgtgaaagccttacagaaatctccaggacctcagcgagaaaggaagtcatcttcatcctcagaagacaggaatcgaatgaaaacacttggtagacgggactcgagtgatgattgggagattcctgatgggcagattacagtgggacaaagaattggatctggatcatttggaacagtctacaagggaaagtggcatggtgatgtggcagtgaaaatgttgaatgtgacagcacctacacctcagcagttacaagccttcaaaaatgaagtaggagtactcaggaaaacacgacatgtgaatatcctactcttcatgggctattccacaaagccacaactggctattgttacccagtggtgtgagggctccagcttgtatcaccatctccatatcattgagaccaaatttgagatgatcaaacttatagatattgcacgacagactgcacagggcatggattacttacacgccaagtcaatcatccacagagacctcaagagtaataatatatttcttcatgaagacctcacagtaaaaataggtgattttggtctagctacaaggaaatctcgatggagtgggtcccatcagtttgaacagttgtctggatccattttgtggatggcaccagaagtcatcagaatgcaagataaaaatccatacagctttcagtcagatgtatatgcatttggaattgttctgtatgaattgatgactggacagttaccttattcaaacatcaacaacagggaccagataatttttatggtgggacgaggatacctgtctccagatctcagtaaggtacggagtaactgtccaaaagccatgaagagattaatggcagagtgcctcaaaaagaaaagagatgagagaccactctttccccaaattctcgcctctattgagctgctggcccgctcattgccaaaaattcaccgcagtgcatcagaaccctccttgaatcgggctggtttccaaacagaggattttagtctatatgcttgtgcttctccaaaaacacccatccaggcagggggatatggtgcgtttcctgtccactgaaacaaatgagtgagagagttcaggagagtagcaacaaaaggaaaataaatgaacatatgtttgcttatatgttaaattgaataaaatactctctttttttttaaggtgaaccaaagaacacttgtgtggttaaagactagatataatttttccccaaactaaaatttatacttaacattggatttttaacatccaagggttaaaatacatagacattgctaaaaattggcagagcctcttctagaggctttactttctgttccgggtttgtatcattcacttggttattttaagtagtaaacttcagtttctcatgcaacttttgttgccagctatcacatgtccactagggactccagaagaagaccctacctatgcctgtgtttgcaggtgagaagttggcagtcggttagcctgggttagataaggcaaactgaacagatctaatttaggaagtcagtagaatttaataattctattattattcttaataatttttctataactatttctttttataacaatttggaaaatgtggatgtcttttatttccttgaagcaataaactaagtttctttttataaaaa

SEQ ID NO: 120 - protein, 766 aa, Artificial sequence
  Synthetic Construct
MAALSGGGGGGAEPGQALFNGDMEPEAGAGAGAAASSAADPAIPEEVWNIKQMIKLTQEHIEALLDKFGGEHNPPSIYLEAYEEYTSKLDALQQREQQLLESLGNGTDFSVSSSASMDTVTSSSSSSLSVLPSSLSVFQNPTDVARSNPKSPQKPIVRVFLPNKQRTVVPARCGVTVRDSLKKALMMRGLIPECCAVYRIQDGEKKPIGWDTDISWLTGEELHVEVLENVPLTTHNFVRKTFFTLAFCDFCRKLLFQGFRCQTCGYKFHQRCSTEVPLMCVNYDQLDLLFVSKFFEHHPIPQEEASLAETALTSGSSPSAPASDSIGPQILTSPSPSKSIPIPQPFRPADEDHRNQFGQRDRSSSAPNVHINTIEPVNIDDLIRDQGFRGDGGSTTGLSATPPASLPGSLTNVKALQKSPGPQRERKSSSSSEDRNRMKTLGRRDSSDDWEIPDGQITVGQRIGSGSFGTVYKGKWHGDVAVKMLNVTAPTPQQLQAFKNEVGVLRKTRHVNILLFMGYSTKPQLAIVTQWCEGSSLYHHLHIIETKFEMIKLIDIARQTAQGMDYLHAKSIIHRDLKSNNIFLHEDLTVKIGDFGLATRKSRWSGSHQFEQLSGSILWMAPEVIRMQDKNPYSFQSDVYAFGIVLYELMTGQLPYSNINNRDQIIFMVGRGYLSPDLSKVRSNCPKAMKRLMAECLKKKRDERPLFPQILASIELLARSLPKIHRSASEPSLNRAGFQTEDFSLYACASPKTPIQAGGYGAFPVH

SEQ ID NO: 121 - DNA, 2949 bp, Artificial sequence
  /note="Description of Artificial Sequence: mutated Homo sapiens BRAF, mutation BRAF_ K601N"
  CDS (62)..(2362)
cgcctcccttccccctccccgcccgacagcggccgctcgggccccggctctcggttataagatggcggcgctgagcggtggcggtggtggcggcgcggagccgggccaggctctgttcaacggggacatggagcccgaggccggcgccggcgccggcgccgcggcctcttcggctgcggaccctgccattccggaggaggtgtggaatatcaaacaaatgattaagttgacacaggaacatatagaggccctattggacaaatttggtggggagcataatccaccatcaatatatctggaggcctatgaagaatacaccagcaagctagatgcactccaacaaagagaacaacagttattggaatctctggggaacggaactgatttttctgtttctagctctgcatcaatggataccgttacatcttcttcctcttctagcctttcagtgctaccttcatctctttcagtttttcaaaatcccacagatgtggcacggagcaaccccaagtcaccacaaaaacctatcgttagagtcttcctgcccaacaaacagaggacagtggtacctgcaaggtgtggagttacagtccgagacagtctaaagaaagcactgatgatgagaggtctaatcccagagtgctgtgctgtttacagaattcaggatggagagaagaaaccaattggttgggacactgatatttcctggcttactggagaagaattgcatgtggaagtgttggagaatgttccacttacaacacacaactttgtacgaaaaacgtttttcaccttagcattttgtgacttttgtcgaaagctgcttttccagggtttccgctgtcaaacatgtggttataaatttcaccagcgttgtagtacagaagttccactgatgtgtgttaattatgaccaacttgatttgctgtttgtctccaagttctttgaacaccacccaataccacaggaagaggcgtccttagcagagactgccctaacatctggatcatccccttccgcacccgcctcggactctattgggccccaaattctcaccagtccgtctccttcaaaatccattccaattccacagcccttccgaccagcagatgaagatcatcgaaatcaatttgggcaacgagaccgatcctcatcagctcccaatgtgcatataaacacaatagaacctgtcaatattgatgacttgattagagaccaaggatttcgtggtgatggaggatcaaccacaggtttgtctgctaccccccctgcctcattacctggctcactaactaacgtgaaagccttacagaaatctccaggacctcagcgagaaaggaagtcatcttcatcctcagaagacaggaatcgaatgaaaacacttggtagacgggactcgagtgatgattgggagattcctgatgggcagattacagtgggacaaagaattggatctggatcatttggaacagtctacaagggaaagtggcatggtgatgtggcagtgaaaatgttgaatgtgacagcacctacacctcagcagttacaagccttcaaaaatgaagtaggagtactcaggaaaacacgacatgtgaatatcctactcttcatgggctattccacaaagccacaactggctattgttacccagtggtgtgagggctccagcttgtatcaccatctccatatcattgagaccaaatttgagatgatcaaacttatagatattgcacgacagactgcacagggcatggattacttacacgccaagtcaatcatccacagagacctcaagagtaataatatatttcttcatgaagacctcacagtaaaaataggtgattttggtctagctacagtgaattctcgatggagtgggtcccatcagtttgaacagttgtctggatccattttgtggatggcaccagaagtcatcagaatgcaagataaaaatccatacagctttcagtcagatgtatatgcatttggaattgttctgtatgaattgatgactggacagttaccttattcaaacatcaacaacagggaccagataatttttatggtgggacgaggatacctgtctccagatctcagtaaggtacggagtaactgtccaaaagccatgaagagattaatggcagagtgcctcaaaaagaaaagagatgagagaccactctttccccaaattctcgcctctattgagctgctggcccgctcattgccaaaaattcaccgcagtgcatcagaaccctccttgaatcgggctggtttccaaacagaggattttagtctatatgcttgtgcttctccaaaaacacccatccaggcagggggatatggtgcgtttcctgtccactgaaacaaatgagtgagagagttcaggagagtagcaacaaaaggaaaataaatgaacatatgtttgcttatatgttaaattgaataaaatactctctttttttttaaggtgaaccaaagaacacttgtgtggttaaagactagatataatttttccccaaactaaaatttatacttaacattggatttttaacatccaagggttaaaatacatagacattgctaaaaattggcagagcctcttctagaggctttactttctgttccgggtttgtatcattcacttggttattttaagtagtaaacttcagtttctcatgcaacttttgttgccagctatcacatgtccactagggactccagaagaagaccctacctatgcctgtgtttgcaggtgagaagttggcagtcggttagcctgggttagataaggcaaactgaacagatctaatttaggaagtcagtagaatttaataattctattattattcttaataatttttctataactatttctttttataacaatttggaaaatgtggatgtcttttatttccttgaagcaataaactaagtttctttttataaaaa

SEQ ID NO: 122 - protein, 766 aa, Artificial sequence
  Synthetic Construct
MAALSGGGGGGAEPGQALFNGDMEPEAGAGAGAAASSAADPAIPEEVWNIKQMIKLTQEHIEALLDKFGGEHNPPSIYLEAYEEYTSKLDALQQREQQLLESLGNGTDFSVSSSASMDTVTSSSSSSLSVLPSSLSVFQNPTDVARSNPKSPQKPIVRVFLPNKQRTVVPARCGVTVRDSLKKALMMRGLIPECCAVYRIQDGEKKPIGWDTDISWLTGEELHVEVLENVPLTTHNFVRKTFFTLAFCDFCRKLLFQGFRCQTCGYKFHQRCSTEVPLMCVNYDQLDLLFVSKFFEHHPIPQEEASLAETALTSGSSPSAPASDSIGPQILTSPSPSKSIPIPQPFRPADEDHRNQFGQRDRSSSAPNVHINTIEPVNIDDLIRDQGFRGDGGSTTGLSATPPASLPGSLTNVKALQKSPGPQRERKSSSSSEDRNRMKTLGRRDSSDDWEIPDGQITVGQRIGSGSFGTVYKGKWHGDVAVKMLNVTAPTPQQLQAFKNEVGVLRKTRHVNILLFMGYSTKPQLAIVTQWCEGSSLYHHLHIIETKFEMIKLIDIARQTAQGMDYLHAKSIIHRDLKSNNIFLHEDLTVKIGDFGLATVNSRWSGSHQFEQLSGSILWMAPEVIRMQDKNPYSFQSDVYAFGIVLYELMTGQLPYSNINNRDQIIFMVGRGYLSPDLSKVRSNCPKAMKRLMAECLKKKRDERPLFPQILASIELLARSLPKIHRSASEPSLNRAGFQTEDFSLYACASPKTPIQAGGYGAFPVH

SEQ ID NO: 123 - DNA, 2949 bp, Artificial sequence
  /note="Description of Artificial Sequence: mutated Homo sapiens BRAF, mutation BRAF_ K601E"
  CDS (62)..(2362)
cgcctcccttccccctccccgcccgacagcggccgctcgggccccggctctcggttataagatggcggcgctgagcggtggcggtggtggcggcgcggagccgggccaggctctgttcaacggggacatggagcccgaggccggcgccggcgccggcgccgcggcctcttcggctgcggaccctgccattccggaggaggtgtggaatatcaaacaaatgattaagttgacacaggaacatatagaggccctattggacaaatttggtggggagcataatccaccatcaatatatctggaggcctatgaagaatacaccagcaagctagatgcactccaacaaagagaacaacagttattggaatctctggggaacggaactgatttttctgtttctagctctgcatcaatggataccgttacatcttcttcctcttctagcctttcagtgctaccttcatctctttcagtttttcaaaatcccacagatgtggcacggagcaaccccaagtcaccacaaaaacctatcgttagagtcttcctgcccaacaaacagaggacagtggtacctgcaaggtgtggagttacagtccgagacagtctaaagaaagcactgatgatgagaggtctaatcccagagtgctgtgctgtttacagaattcaggatggagagaagaaaccaattggttgggacactgatatttcctggcttactggagaagaattgcatgtggaagtgttggagaatgttccacttacaacacacaactttgtacgaaaaacgtttttcaccttagcattttgtgacttttgtcgaaagctgcttttccagggtttccgctgtcaaacatgtggttataaatttcaccagcgttgtagtacagaagttccactgatgtgtgttaattatgaccaacttgatttgctgtttgtctccaagttctttgaacaccacccaataccacaggaagaggcgtccttagcagagactgccctaacatctggatcatccccttccgcacccgcctcggactctattgggccccaaattctcaccagtccgtctccttcaaaatccattccaattccacagcccttccgaccagcagatgaagatcatcgaaatcaatttgggcaacgagaccgatcctcatcagctcccaatgtgcatataaacacaatagaacctgtcaatattgatgacttgattagagaccaaggatttcgtggtgatggaggatcaaccacaggtttgtctgctaccccccctgcctcattacctggctcactaactaacgtgaaagccttacagaaatctccaggacctcagcgagaaaggaagtcatcttcatcctcagaagacaggaatcgaatgaaaacacttggtagacgggactcgagtgatgattgggagattcctgatgggcagattacagtgggacaaagaattggatctggatcatttggaacagtctacaagggaaagtggcatggtgatgtggcagtgaaaatgttgaatgtgacagcacctacacctcagcagttacaagccttcaaaaatgaagtaggagtactcaggaaaacacgacatgtgaatatcctactcttcatgggctattccacaaagccacaactggctattgttacccagtggtgtgagggctccagcttgtatcaccatctccatatcattgagaccaaatttgagatgatcaaacttatagatattgcacgacagactgcacagggcatggattacttacacgccaagtcaatcatccacagagacctcaagagtaataatatatttcttcatgaagacctcacagtaaaaataggtgattttggtctagctacagtggaatctcgatggagtgggtcccatcagtttgaacagttgtctggatccattttgtggatggcaccagaagtcatcagaatgcaagataaaaatccatacagctttcagtcagatgtatatgcatttggaattgttctgtatgaattgatgactggacagttaccttattcaaacatcaacaacagggaccagataatttttatggtgggacgaggatacctgtctccagatctcagtaaggtacggagtaactgtccaaaagccatgaagagattaatggcagagtgcctcaaaaagaaaagagatgagagaccactctttccccaaattctcgcctctattgagctgctggcccgctcattgccaaaaattcaccgcagtgcatcagaaccctccttgaatcgggctggtttccaaacagaggattttagtctatatgcttgtgcttctccaaaaacacccatccaggcagggggatatggtgcgtttcctgtccactgaaacaaatgagtgagagagttcaggagagtagcaacaaaaggaaaataaatgaacatatgtttgcttatatgttaaattgaataaaatactctctttttttttaaggtgaaccaaagaacacttgtgtggttaaagactagatataatttttccccaaactaaaatttatacttaacattggatttttaacatccaagggttaaaatacatagacattgctaaaaattggcagagcctcttctagaggctttactttctgttccgggtttgtatcattcacttggttattttaagtagtaaacttcagtttctcatgcaacttttgttgccagctatcacatgtccactagggactccagaagaagaccctacctatgcctgtgtttgcaggtgagaagttggcagtcggttagcctgggttagataaggcaaactgaacagatctaatttaggaagtcagtagaatttaataattctattattattcttaataatttttctataactatttctttttataacaatttggaaaatgtggatgtcttttatttccttgaagcaataaactaagtttctttttataaaaa

SEQ ID NO: 124 - protein, 766 aa, Artificial sequence
  Synthetic Construct
MAALSGGGGGGAEPGQALFNGDMEPEAGAGAGAAASSAADPAIPEEVWNIKQMIKLTQEHIEALLDKFGGEHNPPSIYLEAYEEYTSKLDALQQREQQLLESLGNGTDFSVSSSASMDTVTSSSSSSLSVLPSSLSVFQNPTDVARSNPKSPQKPIVRVFLPNKQRTVVPARCGVTVRDSLKKALMMRGLIPECCAVYRIQDGEKKPIGWDTDISWLTGEELHVEVLENVPLTTHNFVRKTFFTLAFCDFCRKLLFQGFRCQTCGYKFHQRCSTEVPLMCVNYDQLDLLFVSKFFEHHPIPQEEASLAETALTSGSSPSAPASDSIGPQILTSPSPSKSIPIPQPFRPADEDHRNQFGQRDRSSSAPNVHINTIEPVNIDDLIRDQGFRGDGGSTTGLSATPPASLPGSLTNVKALQKSPGPQRERKSSSSSEDRNRMKTLGRRDSSDDWEIPDGQITVGQRIGSGSFGTVYKGKWHGDVAVKMLNVTAPTPQQLQAFKNEVGVLRKTRHVNILLFMGYSTKPQLAIVTQWCEGSSLYHHLHIIETKFEMIKLIDIARQTAQGMDYLHAKSIIHRDLKSNNIFLHEDLTVKIGDFGLATVESRWSGSHQFEQLSGSILWMAPEVIRMQDKNPYSFQSDVYAFGIVLYELMTGQLPYSNINNRDQIIFMVGRGYLSPDLSKVRSNCPKAMKRLMAECLKKKRDERPLFPQILASIELLARSLPKIHRSASEPSLNRAGFQTEDFSLYACASPKTPIQAGGYGAFPVH

SEQ ID NO: 125 - DNA, 2949 bp, Artificial sequence
  /note="Description of Artificial Sequence: mutated Homo sapiens BRAF, mutation BRAF_ D594G"
  CDS (62)..(2362)
cgcctcccttccccctccccgcccgacagcggccgctcgggccccggctctcggttataagatggcggcgctgagcggtggcggtggtggcggcgcggagccgggccaggctctgttcaacggggacatggagcccgaggccggcgccggcgccggcgccgcggcctcttcggctgcggaccctgccattccggaggaggtgtggaatatcaaacaaatgattaagttgacacaggaacatatagaggccctattggacaaatttggtggggagcataatccaccatcaatatatctggaggcctatgaagaatacaccagcaagctagatgcactccaacaaagagaacaacagttattggaatctctggggaacggaactgatttttctgtttctagctctgcatcaatggataccgttacatcttcttcctcttctagcctttcagtgctaccttcatctctttcagtttttcaaaatcccacagatgtggcacggagcaaccccaagtcaccacaaaaacctatcgttagagtcttcctgcccaacaaacagaggacagtggtacctgcaaggtgtggagttacagtccgagacagtctaaagaaagcactgatgatgagaggtctaatcccagagtgctgtgctgtttacagaattcaggatggagagaagaaaccaattggttgggacactgatatttcctggcttactggagaagaattgcatgtggaagtgttggagaatgttccacttacaacacacaactttgtacgaaaaacgtttttcaccttagcattttgtgacttttgtcgaaagctgcttttccagggtttccgctgtcaaacatgtggttataaatttcaccagcgttgtagtacagaagttccactgatgtgtgttaattatgaccaacttgatttgctgtttgtctccaagttctttgaacaccacccaataccacaggaagaggcgtccttagcagagactgccctaacatctggatcatccccttccgcacccgcctcggactctattgggccccaaattctcaccagtccgtctccttcaaaatccattccaattccacagcccttccgaccagcagatgaagatcatcgaaatcaatttgggcaacgagaccgatcctcatcagctcccaatgtgcatataaacacaatagaacctgtcaatattgatgacttgattagagaccaaggatttcgtggtgatggaggatcaaccacaggtttgtctgctaccccccctgcctcattacctggctcactaactaacgtgaaagccttacagaaatctccaggacctcagcgagaaaggaagtcatcttcatcctcagaagacaggaatcgaatgaaaacacttggtagacgggactcgagtgatgattgggagattcctgatgggcagattacagtgggacaaagaattggatctggatcatttggaacagtctacaagggaaagtggcatggtgatgtggcagtgaaaatgttgaatgtgacagcacctacacctcagcagttacaagccttcaaaaatgaagtaggagtactcaggaaaacacgacatgtgaatatcctactcttcatgggctattccacaaagccacaactggctattgttacccagtggtgtgagggctccagcttgtatcaccatctccatatcattgagaccaaatttgagatgatcaaacttatagatattgcacgacagactgcacagggcatggattacttacacgccaagtcaatcatccacagagacctcaagagtaataatatatttcttcatgaagacctcacagtaaaaataggtggttttggtctagctacagtgaaatctcgatggagtgggtcccatcagtttgaacagttgtctggatccattttgtggatggcaccagaagtcatcagaatgcaagataaaaatccatacagctttcagtcagatgtatatgcatttggaattgttctgtatgaattgatgactggacagttaccttattcaaacatcaacaacagggaccagataatttttatggtgggacgaggatacctgtctccagatctcagtaaggtacggagtaactgtccaaaagccatgaagagattaatggcagagtgcctcaaaaagaaaagagatgagagaccactctttccccaaattctcgcctctattgagctgctggcccgctcattgccaaaaattcaccgcagtgcatcagaaccctccttgaatcgggctggtttccaaacagaggattttagtctatatgcttgtgcttctccaaaaacacccatccaggcagggggatatggtgcgtttcctgtccactgaaacaaatgagtgagagagttcaggagagtagcaacaaaaggaaaataaatgaacatatgtttgcttatatgttaaattgaataaaatactctctttttttttaaggtgaaccaaagaacacttgtgtggttaaagactagatataatttttccccaaactaaaatttatacttaacattggatttttaacatccaagggttaaaatacatagacattgctaaaaattggcagagcctcttctagaggctttactttctgttccgggtttgtatcattcacttggttattttaagtagtaaacttcagtttctcatgcaacttttgttgccagctatcacatgtccactagggactccagaagaagaccctacctatgcctgtgtttgcaggtgagaagttggcagtcggttagcctgggttagataaggcaaactgaacagatctaatttaggaagtcagtagaatttaataattctattattattcttaataatttttctataactatttctttttataacaatttggaaaatgtggatgtcttttatttccttgaagcaataaactaagtttctttttataaaaa

SEQ ID NO: 126 - protein, 766 aa, Artificial sequence
  Synthetic Construct
MAALSGGGGGGAEPGQALFNGDMEPEAGAGAGAAASSAADPAIPEEVWNIKQMIKLTQEHIEALLDKFGGEHNPPSIYLEAYEEYTSKLDALQQREQQLLESLGNGTDFSVSSSASMDTVTSSSSSSLSVLPSSLSVFQNPTDVARSNPKSPQKPIVRVFLPNKQRTVVPARCGVTVRDSLKKALMMRGLIPECCAVYRIQDGEKKPIGWDTDISWLTGEELHVEVLENVPLTTHNFVRKTFFTLAFCDFCRKLLFQGFRCQTCGYKFHQRCSTEVPLMCVNYDQLDLLFVSKFFEHHPIPQEEASLAETALTSGSSPSAPASDSIGPQILTSPSPSKSIPIPQPFRPADEDHRNQFGQRDRSSSAPNVHINTIEPVNIDDLIRDQGFRGDGGSTTGLSATPPASLPGSLTNVKALQKSPGPQRERKSSSSSEDRNRMKTLGRRDSSDDWEIPDGQITVGQRIGSGSFGTVYKGKWHGDVAVKMLNVTAPTPQQLQAFKNEVGVLRKTRHVNILLFMGYSTKPQLAIVTQWCEGSSLYHHLHIIETKFEMIKLIDIARQTAQGMDYLHAKSIIHRDLKSNNIFLHEDLTVKIGGFGLATVKSRWSGSHQFEQLSGSILWMAPEVIRMQDKNPYSFQSDVYAFGIVLYELMTGQLPYSNINNRDQIIFMVGRGYLSPDLSKVRSNCPKAMKRLMAECLKKKRDERPLFPQILASIELLARSLPKIHRSASEPSLNRAGFQTEDFSLYACASPKTPIQAGGYGAFPVH

SEQ ID NO: 127 - DNA, 2949 bp, Artificial sequence
  mutated Homo sapiens BRAF, mutation BRAF_ D594V
  CDS (62)..(2362)
cgcctcccttccccctccccgcccgacagcggccgctcgggccccggctctcggttataagatggcggcgctgagcggtggcggtggtggcggcgcggagccgggccaggctctgttcaacggggacatggagcccgaggccggcgccggcgccggcgccgcggcctcttcggctgcggaccctgccattccggaggaggtgtggaatatcaaacaaatgattaagttgacacaggaacatatagaggccctattggacaaatttggtggggagcataatccaccatcaatatatctggaggcctatgaagaatacaccagcaagctagatgcactccaacaaagagaacaacagttattggaatctctggggaacggaactgatttttctgtttctagctctgcatcaatggataccgttacatcttcttcctcttctagcctttcagtgctaccttcatctctttcagtttttcaaaatcccacagatgtggcacggagcaaccccaagtcaccacaaaaacctatcgttagagtcttcctgcccaacaaacagaggacagtggtacctgcaaggtgtggagttacagtccgagacagtctaaagaaagcactgatgatgagaggtctaatcccagagtgctgtgctgtttacagaattcaggatggagagaagaaaccaattggttgggacactgatatttcctggcttactggagaagaattgcatgtggaagtgttggagaatgttccacttacaacacacaactttgtacgaaaaacgtttttcaccttagcattttgtgacttttgtcgaaagctgcttttccagggtttccgctgtcaaacatgtggttataaatttcaccagcgttgtagtacagaagttccactgatgtgtgttaattatgaccaacttgatttgctgtttgtctccaagttctttgaacaccacccaataccacaggaagaggcgtccttagcagagactgccctaacatctggatcatccccttccgcacccgcctcggactctattgggccccaaattctcaccagtccgtctccttcaaaatccattccaattccacagcccttccgaccagcagatgaagatcatcgaaatcaatttgggcaacgagaccgatcctcatcagctcccaatgtgcatataaacacaatagaacctgtcaatattgatgacttgattagagaccaaggatttcgtggtgatggaggatcaaccacaggtttgtctgctaccccccctgcctcattacctggctcactaactaacgtgaaagccttacagaaatctccaggacctcagcgagaaaggaagtcatcttcatcctcagaagacaggaatcgaatgaaaacacttggtagacgggactcgagtgatgattgggagattcctgatgggcagattacagtgggacaaagaattggatctggatcatttggaacagtctacaagggaaagtggcatggtgatgtggcagtgaaaatgttgaatgtgacagcacctacacctcagcagttacaagccttcaaaaatgaagtaggagtactcaggaaaacacgacatgtgaatatcctactcttcatgggctattccacaaagccacaactggctattgttacccagtggtgtgagggctccagcttgtatcaccatctccatatcattgagaccaaatttgagatgatcaaacttatagatattgcacgacagactgcacagggcatggattacttacacgccaagtcaatcatccacagagacctcaagagtaataatatatttcttcatgaagacctcacagtaaaaataggtgtttttggtctagctacagtgaaatctcgatggagtgggtcccatcagtttgaacagttgtctggatccattttgtggatggcaccagaagtcatcagaatgcaagataaaaatccatacagctttcagtcagatgtatatgcatttggaattgttctgtatgaattgatgactggacagttaccttattcaaacatcaacaacagggaccagataatttttatggtgggacgaggatacctgtctccagatctcagtaaggtacggagtaactgtccaaaagccatgaagagattaatggcagagtgcctcaaaaagaaaagagatgagagaccactctttccccaaattctcgcctctattgagctgctggcccgctcattgccaaaaattcaccgcagtgcatcagaaccctccttgaatcgggctggtttccaaacagaggattttagtctatatgcttgtgcttctccaaaaacacccatccaggcagggggatatggtgcgtttcctgtccactgaaacaaatgagtgagagagttcaggagagtagcaacaaaaggaaaataaatgaacatatgtttgcttatatgttaaattgaataaaatactctctttttttttaaggtgaaccaaagaacacttgtgtggttaaagactagatataatttttccccaaactaaaatttatacttaacattggatttttaacatccaagggttaaaatacatagacattgctaaaaattggcagagcctcttctagaggctttactttctgttccgggtttgtatcattcacttggttattttaagtagtaaacttcagtttctcatgcaacttttgttgccagctatcacatgtccactagggactccagaagaagaccctacctatgcctgtgtttgcaggtgagaagttggcagtcggttagcctgggttagataaggcaaactgaacagatctaatttaggaagtcagtagaatttaataattctattattattcttaataatttttctataactatttctttttataacaatttggaaaatgtggatgtcttttatttccttgaagcaataaactaagtttctttttataaaaa

SEQ ID NO: 128 - protein, 766 aa, Artificial sequence
  Synthetic Construct
MAALSGGGGGGAEPGQALFNGDMEPEAGAGAGAAASSAADPAIPEEVWNIKQMIKLTQEHIEALLDKFGGEHNPPSIYLEAYEEYTSKLDALQQREQQLLESLGNGTDFSVSSSASMDTVTSSSSSSLSVLPSSLSVFQNPTDVARSNPKSPQKPIVRVFLPNKQRTVVPARCGVTVRDSLKKALMMRGLIPECCAVYRIQDGEKKPIGWDTDISWLTGEELHVEVLENVPLTTHNFVRKTFFTLAFCDFCRKLLFQGFRCQTCGYKFHQRCSTEVPLMCVNYDQLDLLFVSKFFEHHPIPQEEASLAETALTSGSSPSAPASDSIGPQILTSPSPSKSIPIPQPFRPADEDHRNQFGQRDRSSSAPNVHINTIEPVNIDDLIRDQGFRGDGGSTTGLSATPPASLPGSLTNVKALQKSPGPQRERKSSSSSEDRNRMKTLGRRDSSDDWEIPDGQITVGQRIGSGSFGTVYKGKWHGDVAVKMLNVTAPTPQQLQAFKNEVGVLRKTRHVNILLFMGYSTKPQLAIVTQWCEGSSLYHHLHIIETKFEMIKLIDIARQTAQGMDYLHAKSIIHRDLKSNNIFLHEDLTVKIGVFGLATVKSRWSGSHQFEQLSGSILWMAPEVIRMQDKNPYSFQSDVYAFGIVLYELMTGQLPYSNINNRDQIIFMVGRGYLSPDLSKVRSNCPKAMKRLMAECLKKKRDERPLFPQILASIELLARSLPKIHRSASEPSLNRAGFQTEDFSLYACASPKTPIQAGGYGAFPVH

SEQ ID NO: 129 - DNA, 2949 bp, Artificial sequence
  /note="Description of Artificial Sequence: mutated Homo sapiens BRAF, mutation BRAF_ L597R"
  CDS (62)..(2362)
cgcctcccttccccctccccgcccgacagcggccgctcgggccccggctctcggttataagatggcggcgctgagcggtggcggtggtggcggcgcggagccgggccaggctctgttcaacggggacatggagcccgaggccggcgccggcgccggcgccgcggcctcttcggctgcggaccctgccattccggaggaggtgtggaatatcaaacaaatgattaagttgacacaggaacatatagaggccctattggacaaatttggtggggagcataatccaccatcaatatatctggaggcctatgaagaatacaccagcaagctagatgcactccaacaaagagaacaacagttattggaatctctggggaacggaactgatttttctgtttctagctctgcatcaatggataccgttacatcttcttcctcttctagcctttcagtgctaccttcatctctttcagtttttcaaaatcccacagatgtggcacggagcaaccccaagtcaccacaaaaacctatcgttagagtcttcctgcccaacaaacagaggacagtggtacctgcaaggtgtggagttacagtccgagacagtctaaagaaagcactgatgatgagaggtctaatcccagagtgctgtgctgtttacagaattcaggatggagagaagaaaccaattggttgggacactgatatttcctggcttactggagaagaattgcatgtggaagtgttggagaatgttccacttacaacacacaactttgtacgaaaaacgtttttcaccttagcattttgtgacttttgtcgaaagctgcttttccagggtttccgctgtcaaacatgtggttataaatttcaccagcgttgtagtacagaagttccactgatgtgtgttaattatgaccaacttgatttgctgtttgtctccaagttctttgaacaccacccaataccacaggaagaggcgtccttagcagagactgccctaacatctggatcatccccttccgcacccgcctcggactctattgggccccaaattctcaccagtccgtctccttcaaaatccattccaattccacagcccttccgaccagcagatgaagatcatcgaaatcaatttgggcaacgagaccgatcctcatcagctcccaatgtgcatataaacacaatagaacctgtcaatattgatgacttgattagagaccaaggatttcgtggtgatggaggatcaaccacaggtttgtctgctaccccccctgcctcattacctggctcactaactaacgtgaaagccttacagaaatctccaggacctcagcgagaaaggaagtcatcttcatcctcagaagacaggaatcgaatgaaaacacttggtagacgggactcgagtgatgattgggagattcctgatgggcagattacagtgggacaaagaattggatctggatcatttggaacagtctacaagggaaagtggcatggtgatgtggcagtgaaaatgttgaatgtgacagcacctacacctcagcagttacaagccttcaaaaatgaagtaggagtactcaggaaaacacgacatgtgaatatcctactcttcatgggctattccacaaagccacaactggctattgttacccagtggtgtgagggctccagcttgtatcaccatctccatatcattgagaccaaatttgagatgatcaaacttatagatattgcacgacagactgcacagggcatggattacttacacgccaagtcaatcatccacagagacctcaagagtaataatatatttcttcatgaagacctcacagtaaaaataggtgattttggtcgagctacagtgaaatctcgatggagtgggtcccatcagtttgaacagttgtctggatccattttgtggatggcaccagaagtcatcagaatgcaagataaaaatccatacagctttcagtcagatgtatatgcatttggaattgttctgtatgaattgatgactggacagttaccttattcaaacatcaacaacagggaccagataatttttatggtgggacgaggatacctgtctccagatctcagtaaggtacggagtaactgtccaaaagccatgaagagattaatggcagagtgcctcaaaaagaaaagagatgagagaccactctttccccaaattctcgcctctattgagctgctggcccgctcattgccaaaaattcaccgcagtgcatcagaaccctccttgaatcgggctggtttccaaacagaggattttagtctatatgcttgtgcttctccaaaaacacccatccaggcagggggatatggtgcgtttcctgtccactgaaacaaatgagtgagagagttcaggagagtagcaacaaaaggaaaataaatgaacatatgtttgcttatatgttaaattgaataaaatactctctttttttttaaggtgaaccaaagaacacttgtgtggttaaagactagatataatttttccccaaactaaaatttatacttaacattggatttttaacatccaagggttaaaatacatagacattgctaaaaattggcagagcctcttctagaggctttactttctgttccgggtttgtatcattcacttggttattttaagtagtaaacttcagtttctcatgcaacttttgttgccagctatcacatgtccactagggactccagaagaagaccctacctatgcctgtgtttgcaggtgagaagttggcagtcggttagcctgggttagataaggcaaactgaacagatctaatttaggaagtcagtagaatttaataattctattattattcttaataatttttctataactatttctttttataacaatttggaaaatgtggatgtcttttatttccttgaagcaataaactaagtttctttttataaaaa

SEQ ID NO: 130 - protein, 766 aa, Artificial sequence
  Synthetic Construct
MAALSGGGGGGAEPGQALFNGDMEPEAGAGAGAAASSAADPAIPEEVWNIKQMIKLTQEHIEALLDKFGGEHNPPSIYLEAYEEYTSKLDALQQREQQLLESLGNGTDFSVSSSASMDTVTSSSSSSLSVLPSSLSVFQNPTDVARSNPKSPQKPIVRVFLPNKQRTVVPARCGVTVRDSLKKALMMRGLIPECCAVYRIQDGEKKPIGWDTDISWLTGEELHVEVLENVPLTTHNFVRKTFFTLAFCDFCRKLLFQGFRCQTCGYKFHQRCSTEVPLMCVNYDQLDLLFVSKFFEHHPIPQEEASLAETALTSGSSPSAPASDSIGPQILTSPSPSKSIPIPQPFRPADEDHRNQFGQRDRSSSAPNVHINTIEPVNIDDLIRDQGFRGDGGSTTGLSATPPASLPGSLTNVKALQKSPGPQRERKSSSSSEDRNRMKTLGRRDSSDDWEIPDGQITVGQRIGSGSFGTVYKGKWHGDVAVKMLNVTAPTPQQLQAFKNEVGVLRKTRHVNILLFMGYSTKPQLAIVTQWCEGSSLYHHLHIIETKFEMIKLIDIARQTAQGMDYLHAKSIIHRDLKSNNIFLHEDLTVKIGDFGRATVKSRWSGSHQFEQLSGSILWMAPEVIRMQDKNPYSFQSDVYAFGIVLYELMTGQLPYSNINNRDQIIFMVGRGYLSPDLSKVRSNCPKAMKRLMAECLKKKRDERPLFPQILASIELLARSLPKIHRSASEPSLNRAGFQTEDFSLYACASPKTPIQAGGYGAFPVH

SEQ ID NO: 131 - DNA, 2949 bp, Artificial sequence
  mutated Homo sapiens BRAF, mutation BRAF_ L597Q
  CDS (62)..(2362)
cgcctcccttccccctccccgcccgacagcggccgctcgggccccggctctcggttataagatggcggcgctgagcggtggcggtggtggcggcgcggagccgggccaggctctgttcaacggggacatggagcccgaggccggcgccggcgccggcgccgcggcctcttcggctgcggaccctgccattccggaggaggtgtggaatatcaaacaaatgattaagttgacacaggaacatatagaggccctattggacaaatttggtggggagcataatccaccatcaatatatctggaggcctatgaagaatacaccagcaagctagatgcactccaacaaagagaacaacagttattggaatctctggggaacggaactgatttttctgtttctagctctgcatcaatggataccgttacatcttcttcctcttctagcctttcagtgctaccttcatctctttcagtttttcaaaatcccacagatgtggcacggagcaaccccaagtcaccacaaaaacctatcgttagagtcttcctgcccaacaaacagaggacagtggtacctgcaaggtgtggagttacagtccgagacagtctaaagaaagcactgatgatgagaggtctaatcccagagtgctgtgctgtttacagaattcaggatggagagaagaaaccaattggttgggacactgatatttcctggcttactggagaagaattgcatgtggaagtgttggagaatgttccacttacaacacacaactttgtacgaaaaacgtttttcaccttagcattttgtgacttttgtcgaaagctgcttttccagggtttccgctgtcaaacatgtggttataaatttcaccagcgttgtagtacagaagttccactgatgtgtgttaattatgaccaacttgatttgctgtttgtctccaagttctttgaacaccacccaataccacaggaagaggcgtccttagcagagactgccctaacatctggatcatccccttccgcacccgcctcggactctattgggccccaaattctcaccagtccgtctccttcaaaatccattccaattccacagcccttccgaccagcagatgaagatcatcgaaatcaatttgggcaacgagaccgatcctcatcagctcccaatgtgcatataaacacaatagaacctgtcaatattgatgacttgattagagaccaaggatttcgtggtgatggaggatcaaccacaggtttgtctgctaccccccctgcctcattacctggctcactaactaacgtgaaagccttacagaaatctccaggacctcagcgagaaaggaagtcatcttcatcctcagaagacaggaatcgaatgaaaacacttggtagacgggactcgagtgatgattgggagattcctgatgggcagattacagtgggacaaagaattggatctggatcatttggaacagtctacaagggaaagtggcatggtgatgtggcagtgaaaatgttgaatgtgacagcacctacacctcagcagttacaagccttcaaaaatgaagtaggagtactcaggaaaacacgacatgtgaatatcctactcttcatgggctattccacaaagccacaactggctattgttacccagtggtgtgagggctccagcttgtatcaccatctccatatcattgagaccaaatttgagatgatcaaacttatagatattgcacgacagactgcacagggcatggattacttacacgccaagtcaatcatccacagagacctcaagagtaataatatatttcttcatgaagacctcacagtaaaaataggtgattttggtcaagctacagtgaaatctcgatggagtgggtcccatcagtttgaacagttgtctggatccattttgtggatggcaccagaagtcatcagaatgcaagataaaaatccatacagctttcagtcagatgtatatgcatttggaattgttctgtatgaattgatgactggacagttaccttattcaaacatcaacaacagggaccagataatttttatggtgggacgaggatacctgtctccagatctcagtaaggtacggagtaactgtccaaaagccatgaagagattaatggcagagtgcctcaaaaagaaaagagatgagagaccactctttccccaaattctcgcctctattgagctgctggcccgctcattgccaaaaattcaccgcagtgcatcagaaccctccttgaatcgggctggtttccaaacagaggattttagtctatatgcttgtgcttctccaaaaacacccatccaggcagggggatatggtgcgtttcctgtccactgaaacaaatgagtgagagagttcaggagagtagcaacaaaaggaaaataaatgaacatatgtttgcttatatgttaaattgaataaaatactctctttttttttaaggtgaaccaaagaacacttgtgtggttaaagactagatataatttttccccaaactaaaatttatacttaacattggatttttaacatccaagggttaaaatacatagacattgctaaaaattggcagagcctcttctagaggctttactttctgttccgggtttgtatcattcacttggttattttaagtagtaaacttcagtttctcatgcaacttttgttgccagctatcacatgtccactagggactccagaagaagaccctacctatgcctgtgtttgcaggtgagaagttggcagtcggttagcctgggttagataaggcaaactgaacagatctaatttaggaagtcagtagaatttaataattctattattattcttaataatttttctataactatttctttttataacaatttggaaaatgtggatgtcttttatttccttgaagcaataaactaagtttctttttataaaaa

SEQ ID NO: 132 - protein, 766 aa, Artificial sequence
  Synthetic Construct
MAALSGGGGGGAEPGQALFNGDMEPEAGAGAGAAASSAADPAIPEEVWNIKQMIKLTQEHIEALLDKFGGEHNPPSIYLEAYEEYTSKLDALQQREQQLLESLGNGTDFSVSSSASMDTVTSSSSSSLSVLPSSLSVFQNPTDVARSNPKSPQKPIVRVFLPNKQRTVVPARCGVTVRDSLKKALMMRGLIPECCAVYRIQDGEKKPIGWDTDISWLTGEELHVEVLENVPLTTHNFVRKTFFTLAFCDFCRKLLFQGFRCQTCGYKFHQRCSTEVPLMCVNYDQLDLLFVSKFFEHHPIPQEEASLAETALTSGSSPSAPASDSIGPQILTSPSPSKSIPIPQPFRPADEDHRNQFGQRDRSSSAPNVHINTIEPVNIDDLIRDQGFRGDGGSTTGLSATPPASLPGSLTNVKALQKSPGPQRERKSSSSSEDRNRMKTLGRRDSSDDWEIPDGQITVGQRIGSGSFGTVYKGKWHGDVAVKMLNVTAPTPQQLQAFKNEVGVLRKTRHVNILLFMGYSTKPQLAIVTQWCEGSSLYHHLHIIETKFEMIKLIDIARQTAQGMDYLHAKSIIHRDLKSNNIFLHEDLTVKIGDFGQATVKSRWSGSHQFEQLSGSILWMAPEVIRMQDKNPYSFQSDVYAFGIVLYELMTGQLPYSNINNRDQIIFMVGRGYLSPDLSKVRSNCPKAMKRLMAECLKKKRDERPLFPQILASIELLARSLPKIHRSASEPSLNRAGFQTEDFSLYACASPKTPIQAGGYGAFPVH

SEQ ID NO: 133 - DNA, 2949 bp, Artificial sequence
  /note="Description of Artificial Sequence: mutated Homo sapiens BRAF, mutation BRAF_ T599I"
  CDS (62)..(2362)
cgcctcccttccccctccccgcccgacagcggccgctcgggccccggctctcggttataagatggcggcgctgagcggtggcggtggtggcggcgcggagccgggccaggctctgttcaacggggacatggagcccgaggccggcgccggcgccggcgccgcggcctcttcggctgcggaccctgccattccggaggaggtgtggaatatcaaacaaatgattaagttgacacaggaacatatagaggccctattggacaaatttggtggggagcataatccaccatcaatatatctggaggcctatgaagaatacaccagcaagctagatgcactccaacaaagagaacaacagttattggaatctctggggaacggaactgatttttctgtttctagctctgcatcaatggataccgttacatcttcttcctcttctagcctttcagtgctaccttcatctctttcagtttttcaaaatcccacagatgtggcacggagcaaccccaagtcaccacaaaaacctatcgttagagtcttcctgcccaacaaacagaggacagtggtacctgcaaggtgtggagttacagtccgagacagtctaaagaaagcactgatgatgagaggtctaatcccagagtgctgtgctgtttacagaattcaggatggagagaagaaaccaattggttgggacactgatatttcctggcttactggagaagaattgcatgtggaagtgttggagaatgttccacttacaacacacaactttgtacgaaaaacgtttttcaccttagcattttgtgacttttgtcgaaagctgcttttccagggtttccgctgtcaaacatgtggttataaatttcaccagcgttgtagtacagaagttccactgatgtgtgttaattatgaccaacttgatttgctgtttgtctccaagttctttgaacaccacccaataccacaggaagaggcgtccttagcagagactgccctaacatctggatcatccccttccgcacccgcctcggactctattgggccccaaattctcaccagtccgtctccttcaaaatccattccaattccacagcccttccgaccagcagatgaagatcatcgaaatcaatttgggcaacgagaccgatcctcatcagctcccaatgtgcatataaacacaatagaacctgtcaatattgatgacttgattagagaccaaggatttcgtggtgatggaggatcaaccacaggtttgtctgctaccccccctgcctcattacctggctcactaactaacgtgaaagccttacagaaatctccaggacctcagcgagaaaggaagtcatcttcatcctcagaagacaggaatcgaatgaaaacacttggtagacgggactcgagtgatgattgggagattcctgatgggcagattacagtgggacaaagaattggatctggatcatttggaacagtctacaagggaaagtggcatggtgatgtggcagtgaaaatgttgaatgtgacagcacctacacctcagcagttacaagccttcaaaaatgaagtaggagtactcaggaaaacacgacatgtgaatatcctactcttcatgggctattccacaaagccacaactggctattgttacccagtggtgtgagggctccagcttgtatcaccatctccatatcattgagaccaaatttgagatgatcaaacttatagatattgcacgacagactgcacagggcatggattacttacacgccaagtcaatcatccacagagacctcaagagtaataatatatttcttcatgaagacctcacagtaaaaataggtgattttggtctagctatagtgaaatctcgatggagtgggtcccatcagtttgaacagttgtctggatccattttgtggatggcaccagaagtcatcagaatgcaagataaaaatccatacagctttcagtcagatgtatatgcatttggaattgttctgtatgaattgatgactggacagttaccttattcaaacatcaacaacagggaccagataatttttatggtgggacgaggatacctgtctccagatctcagtaaggtacggagtaactgtccaaaagccatgaagagattaatggcagagtgcctcaaaaagaaaagagatgagagaccactctttccccaaattctcgcctctattgagctgctggcccgctcattgccaaaaattcaccgcagtgcatcagaaccctccttgaatcgggctggtttccaaacagaggattttagtctatatgcttgtgcttctccaaaaacacccatccaggcagggggatatggtgcgtttcctgtccactgaaacaaatgagtgagagagttcaggagagtagcaacaaaaggaaaataaatgaacatatgtttgcttatatgttaaattgaataaaatactctctttttttttaaggtgaaccaaagaacacttgtgtggttaaagactagatataatttttccccaaactaaaatttatacttaacattggatttttaacatccaagggttaaaatacatagacattgctaaaaattggcagagcctcttctagaggctttactttctgttccgggtttgtatcattcacttggttattttaagtagtaaacttcagtttctcatgcaacttttgttgccagctatcacatgtccactagggactccagaagaagaccctacctatgcctgtgtttgcaggtgagaagttggcagtcggttagcctgggttagataaggcaaactgaacagatctaatttaggaagtcagtagaatttaataattctattattattcttaataatttttctataactatttctttttataacaatttggaaaatgtggatgtcttttatttccttgaagcaataaactaagtttctttttataaaaa

SEQ ID NO: 134 - protein, 766 aa, Artificial sequence
  Synthetic Construct
MAALSGGGGGGAEPGQALFNGDMEPEAGAGAGAAASSAADPAIPEEVWNIKQMIKLTQEHIEALLDKFGGEHNPPSIYLEAYEEYTSKLDALQQREQQLLESLGNGTDFSVSSSASMDTVTSSSSSSLSVLPSSLSVFQNPTDVARSNPKSPQKPIVRVFLPNKQRTVVPARCGVTVRDSLKKALMMRGLIPECCAVYRIQDGEKKPIGWDTDISWLTGEELHVEVLENVPLTTHNFVRKTFFTLAFCDFCRKLLFQGFRCQTCGYKFHQRCSTEVPLMCVNYDQLDLLFVSKFFEHHPIPQEEASLAETALTSGSSPSAPASDSIGPQILTSPSPSKSIPIPQPFRPADEDHRNQFGQRDRSSSAPNVHINTIEPVNIDDLIRDQGFRGDGGSTTGLSATPPASLPGSLTNVKALQKSPGPQRERKSSSSSEDRNRMKTLGRRDSSDDWEIPDGQITVGQRIGSGSFGTVYKGKWHGDVAVKMLNVTAPTPQQLQAFKNEVGVLRKTRHVNILLFMGYSTKPQLAIVTQWCEGSSLYHHLHIIETKFEMIKLIDIARQTAQGMDYLHAKSIIHRDLKSNNIFLHEDLTVKIGDFGLAIVKSRWSGSHQFEQLSGSILWMAPEVIRMQDKNPYSFQSDVYAFGIVLYELMTGQLPYSNINNRDQIIFMVGRGYLSPDLSKVRSNCPKAMKRLMAECLKKKRDERPLFPQILASIELLARSLPKIHRSASEPSLNRAGFQTEDFSLYACASPKTPIQAGGYGAFPVH

SEQ ID NO: 135 - DNA, 2949 bp, Artificial sequence
  /note="Description of Artificial Sequence: mutated Homo sapiens BRAF, mutation BRAF_ V600L"
  CDS (62)..(2362)
cgcctcccttccccctccccgcccgacagcggccgctcgggccccggctctcggttataagatggcggcgctgagcggtggcggtggtggcggcgcggagccgggccaggctctgttcaacggggacatggagcccgaggccggcgccggcgccggcgccgcggcctcttcggctgcggaccctgccattccggaggaggtgtggaatatcaaacaaatgattaagttgacacaggaacatatagaggccctattggacaaatttggtggggagcataatccaccatcaatatatctggaggcctatgaagaatacaccagcaagctagatgcactccaacaaagagaacaacagttattggaatctctggggaacggaactgatttttctgtttctagctctgcatcaatggataccgttacatcttcttcctcttctagcctttcagtgctaccttcatctctttcagtttttcaaaatcccacagatgtggcacggagcaaccccaagtcaccacaaaaacctatcgttagagtcttcctgcccaacaaacagaggacagtggtacctgcaaggtgtggagttacagtccgagacagtctaaagaaagcactgatgatgagaggtctaatcccagagtgctgtgctgtttacagaattcaggatggagagaagaaaccaattggttgggacactgatatttcctggcttactggagaagaattgcatgtggaagtgttggagaatgttccacttacaacacacaactttgtacgaaaaacgtttttcaccttagcattttgtgacttttgtcgaaagctgcttttccagggtttccgctgtcaaacatgtggttataaatttcaccagcgttgtagtacagaagttccactgatgtgtgttaattatgaccaacttgatttgctgtttgtctccaagttctttgaacaccacccaataccacaggaagaggcgtccttagcagagactgccctaacatctggatcatccccttccgcacccgcctcggactctattgggccccaaattctcaccagtccgtctccttcaaaatccattccaattccacagcccttccgaccagcagatgaagatcatcgaaatcaatttgggcaacgagaccgatcctcatcagctcccaatgtgcatataaacacaatagaacctgtcaatattgatgacttgattagagaccaaggatttcgtggtgatggaggatcaaccacaggtttgtctgctaccccccctgcctcattacctggctcactaactaacgtgaaagccttacagaaatctccaggacctcagcgagaaaggaagtcatcttcatcctcagaagacaggaatcgaatgaaaacacttggtagacgggactcgagtgatgattgggagattcctgatgggcagattacagtgggacaaagaattggatctggatcatttggaacagtctacaagggaaagtggcatggtgatgtggcagtgaaaatgttgaatgtgacagcacctacacctcagcagttacaagccttcaaaaatgaagtaggagtactcaggaaaacacgacatgtgaatatcctactcttcatgggctattccacaaagccacaactggctattgttacccagtggtgtgagggctccagcttgtatcaccatctccatatcattgagaccaaatttgagatgatcaaacttatagatattgcacgacagactgcacagggcatggattacttacacgccaagtcaatcatccacagagacctcaagagtaataatatatttcttcatgaagacctcacagtaaaaataggtgattttggtctagctacactgaaatctcgatggagtgggtcccatcagtttgaacagttgtctggatccattttgtggatggcaccagaagtcatcagaatgcaagataaaaatccatacagctttcagtcagatgtatatgcatttggaattgttctgtatgaattgatgactggacagttaccttattcaaacatcaacaacagggaccagataatttttatggtgggacgaggatacctgtctccagatctcagtaaggtacggagtaactgtccaaaagccatgaagagattaatggcagagtgcctcaaaaagaaaagagatgagagaccactctttccccaaattctcgcctctattgagctgctggcccgctcattgccaaaaattcaccgcagtgcatcagaaccctccttgaatcgggctggtttccaaacagaggattttagtctatatgcttgtgcttctccaaaaacacccatccaggcagggggatatggtgcgtttcctgtccactgaaacaaatgagtgagagagttcaggagagtagcaacaaaaggaaaataaatgaacatatgtttgcttatatgttaaattgaataaaatactctctttttttttaaggtgaaccaaagaacacttgtgtggttaaagactagatataatttttccccaaactaaaatttatacttaacattggatttttaacatccaagggttaaaatacatagacattgctaaaaattggcagagcctcttctagaggctttactttctgttccgggtttgtatcattcacttggttattttaagtagtaaacttcagtttctcatgcaacttttgttgccagctatcacatgtccactagggactccagaagaagaccctacctatgcctgtgtttgcaggtgagaagttggcagtcggttagcctgggttagataaggcaaactgaacagatctaatttaggaagtcagtagaatttaataattctattattattcttaataatttttctataactatttctttttataacaatttggaaaatgtggatgtcttttatttccttgaagcaataaactaagtttctttttataaaaa

SEQ ID NO: 136 - protein, 766 aa, Artificial sequence
  Synthetic Construct
MAALSGGGGGGAEPGQALFNGDMEPEAGAGAGAAASSAADPAIPEEVWNIKQMIKLTQEHIEALLDKFGGEHNPPSIYLEAYEEYTSKLDALQQREQQLLESLGNGTDFSVSSSASMDTVTSSSSSSLSVLPSSLSVFQNPTDVARSNPKSPQKPIVRVFLPNKQRTVVPARCGVTVRDSLKKALMMRGLIPECCAVYRIQDGEKKPIGWDTDISWLTGEELHVEVLENVPLTTHNFVRKTFFTLAFCDFCRKLLFQGFRCQTCGYKFHQRCSTEVPLMCVNYDQLDLLFVSKFFEHHPIPQEEASLAETALTSGSSPSAPASDSIGPQILTSPSPSKSIPIPQPFRPADEDHRNQFGQRDRSSSAPNVHINTIEPVNIDDLIRDQGFRGDGGSTTGLSATPPASLPGSLTNVKALQKSPGPQRERKSSSSSEDRNRMKTLGRRDSSDDWEIPDGQITVGQRIGSGSFGTVYKGKWHGDVAVKMLNVTAPTPQQLQAFKNEVGVLRKTRHVNILLFMGYSTKPQLAIVTQWCEGSSLYHHLHIIETKFEMIKLIDIARQTAQGMDYLHAKSIIHRDLKSNNIFLHEDLTVKIGDFGLATLKSRWSGSHQFEQLSGSILWMAPEVIRMQDKNPYSFQSDVYAFGIVLYELMTGQLPYSNINNRDQIIFMVGRGYLSPDLSKVRSNCPKAMKRLMAECLKKKRDERPLFPQILASIELLARSLPKIHRSASEPSLNRAGFQTEDFSLYACASPKTPIQAGGYGAFPVH

SEQ ID NO: 137 - DNA, 3887 bp, Homo sapiens
  mRNA (1)..(3887): heat shock protein 90kDa alpha (cytosolic), class A member 1 (HSP90AA1/HSP90), transcript variant 1
gactgcgcaggcgtgctcacctggcgtgctccacccgactgggcgtccgcaggctcctcccccgggtgtggcctccgggcggcatggctgcttcccaggtgatgccggcttcagctagtggggtctagttgaccgttccgcagccgccagggccagcggaaagccggtcagggggaaccgcggcggggctggtgtcatgagcctgaggtgaacttgagggtgcctcctcagcggtctcccgccctgccctgaggggcgccgggaccccaaagagcggaggaagagcgccaccccgacggccaccgcttcggagccagcacgcggggtaccctacggggagcgcggatgcccccgtgttcgggcggggacggctccacccctcctgggccctcccttcgggacagggactgtcccgcccagagtgctgaatacccgcgcgaccgtctggatccccgcccaggaagcccctctgaagcctcctcgccgccgtttctgagaagcagggcacctgttaactggtaccaagaaaaggcccaagtgtttctctggcatctgatggtgtctggatccaccactctactctgtctctggaaacagcccttccacgtctctgcattccctgtcaccgcgtcactggccttcagacagagccaaggtgcagggcaacacctctacaaggatctgcagccatttatattgcttaggctactgatgcctgaggaaacccagacccaagaccaaccgatggaggaggaggaggttgagacgttcgcctttcaggcagaaattgcccagttgatgtcattgatcatcaatactttctactcgaacaaagagatctttctgagagagctcatttcaaattcatcagatgcattggacaaaatccggtatgaaagcttgacagatcccagtaaattagactctgggaaagagctgcatattaaccttataccgaacaaacaagatcgaactctcactattgtggatactggaattggaatgaccaaggctgacttgatcaataaccttggtactatcgccaagtctgggaccaaagcgttcatggaagctttgcaggctggtgcagatatctctatgattggccagttcggtgttggtttttattctgcttatttggttgctgagaaagtaactgtgatcaccaaacataacgatgatgagcagtacgcttgggagtcctcagcagggggatcattcacagtgaggacagacacaggtgaacctatgggtcgtggaacaaaagttatcctacacctgaaagaagaccaaactgagtacttggaggaacgaagaataaaggagattgtgaagaaacattctcagtttattggatatcccattactctttttgtggagaaggaacgtgataaagaagtaagcgatgatgaggctgaagaaaaggaagacaaagaagaagaaaaagaaaaagaagagaaagagtcggaagacaaacctgaaattgaagatgttggttctgatgaggaagaagaaaagaaggatggtgacaagaagaagaagaagaagattaaggaaaagtacatcgatcaagaagagctcaacaaaacaaagcccatctggaccagaaatcccgacgatattactaatgaggagtacggagaattctataagagcttgaccaatgactgggaagatcacttggcagtgaagcatttttcagttgaaggacagttggaattcagagcccttctatttgtcccacgacgtgctccttttgatctgtttgaaaacagaaagaaaaagaacaacatcaaattgtatgtacgcagagttttcatcatggataactgtgaggagctaatccctgaatatctgaacttcattagaggggtggtagactcggaggatctccctctaaacatatcccgtgagatgttgcaacaaagcaaaattttgaaagttatcaggaagaatttggtcaaaaaatgcttagaactctttactgaactggcggaagataaagagaactacaagaaattctatgagcagttctctaaaaacataaagcttggaatacacgaagactctcaaaatcggaagaagctttcagagctgttaaggtactacacatctgcctctggtgatgagatggtttctctcaaggactactgcaccagaatgaaggagaaccagaaacatatctattatatcacaggtgagaccaaggaccaggtagctaactcagcctttgtggaacgtcttcggaaacatggcttagaagtgatctatatgattgagcccattgatgagtactgtgtccaacagctgaaggaatttgaggggaagactttagtgtcagtcaccaaagaaggcctggaacttccagaggatgaagaagagaaaaagaagcaggaagagaaaaaaacaaagtttgagaacctctgcaaaatcatgaaagacatattggagaaaaaagttgaaaaggtggttgtgtcaaaccgattggtgacatctccatgctgtattgtcacaagcacatatggctggacagcaaacatggagagaatcatgaaagctcaagccctaagagacaactcaacaatgggttacatggcagcaaagaaacacctggagataaaccctgaccattccattattgagaccttaaggcaaaaggcagaggctgataagaacgacaagtctgtgaaggatctggtcatcttgctttatgaaactgcgctcctgtcttctggcttcagtctggaagatccccagacacatgctaacaggatctacaggatgatcaaacttggtctgggtattgatgaagatgaccctactgctgatgataccagtgctgctgtaactgaagaaatgccaccccttgaaggagatgacgacacatcacgcatggaagaagtagactaatctctggctgagggatgacttacctgttcagtactctacaattcctctgataatatattttcaaggatgtttttctttatttttgttaatattaaaaagtctgtatggcatgacaactactttaaggggaagataagatttctgtctactaagtgatgctgtgataccttaggcactaaagcagagctagtaatgctttttgagtttcatgttggtttattttcacagattggggtaacgtgcactgtaagacgtatgtaacatgatgttaactttgtggtctaaagtgtttagctgtcaagccggatgcctaagtagaccaaatcttgttattgaagtgttctgagctgtatcttgatgtttagaaaagtattcgttacatcttgtaggatctactttttgaacttttcattccctgtagttgacaattctgcatgtactagtcctctagaaataggttaaactgaagcaacttgatggaaggatctctccacagggcttgttttccaaagaaaagtattgtttggaggagcaaagttaaaagcctacctaagcatatcgtaaagctgttcaaaaataactcagacccagtcttgtggatggaaatgtagtgctcgagtcacattctgcttaaagttgtaacaaatacagatgagttaaaagatattgtgtgacagtgtcttatttagggggaaaggggagtatctggatgacagttagtgccaaaatgtaaaacatgaggcgctagcaggagatggttaaacactagctgctccaagggttgacatggtcttcccagcatgtactcagcaggtgtggggtggagcacacgtaggcacagaaaacaggaatgcagacaacatgcatcccctgcgtccatgagttacatgtgttctcttagtgtccacgttgttttgatgttattcatggaataccttctgtgttaaatacagtcacttaattccttggccttaaaa

SEQ ID NO: 138 - protein, 854 aa, Homo sapiens
  MISC_FEATURE (1)..(854): heat shock protein 90kDa alpha (cytosolic), class A member 1 isoform 1 (HSP90AA1)
MPPCSGGDGSTPPGPSLRDRDCPAQSAEYPRDRLDPRPGSPSEASSPPFLRSRAPVNWYQEKAQVFLWHLMVSGSTTLLCLWKQPFHVSAFPVTASLAFRQSQGAGQHLYKDLQPFILLRLLMPEETQTQDQPMEEEEVETFAFQAEIAQLMSLIINTFYSNKEIFLRELISNSSDALDKIRYESLTDPSKLDSGKELHINLIPNKQDRTLTIVDTGIGMTKADLINNLGTIAKSGTKAFMEALQAGADISMIGQFGVGFYSAYLVAEKVTVITKHNDDEQYAWESSAGGSFTVRTDTGEPMGRGTKVILHLKEDQTEYLEERRIKEIVKKHSQFIGYPITLFVEKERDKEVSDDEAEEKEDKEEEKEKEEKESEDKPEIEDVGSDEEEEKKDGDKKKKKKIKEKYIDQEELNKTKPIWTRNPDDITNEEYGEFYKSLTNDWEDHLAVKHFSVEGQLEFRALLFVPRRAPFDLFENRKKKNNIKLYVRRVFIMDNCEELIPEYLNFIRGVVDSEDLPLNISREMLQQSKILKVIRKNLVKKCLELFTELAEDKENYKKFYEQFSKNIKLGIHEDSQNRKKLSELLRYYTSASGDEMVSLKDYCTRMKENQKHIYYITGETKDQVANSAFVERLRKHGLEVIYMIEPIDEYCVQQLKEFEGKTLVSVTKEGLELPEDEEEKKKQEEKKTKFENLCKIMKDILEKKVEKVVVSNRLVTSPCCIVTSTYGWTANMERIMKAQALRDNSTMGYMAAKKHLEINPDHSIIETLRQKAEADKNDKSVKDLVILLYETALLSSGFSLEDPQTHANRIYRMIKLGLGIDEDDPTADDTSAAVTEEMPPLEGDDDTSRMEEVD

SEQ ID NO: 139 - DNA, 3366 bp, Homo Sapiens
  mRNA (1)..(3366): heat shock protein 90kDa alpha (cytosolic), class A member 1 (HSP90AA1), transcript variant 2
gcatgcgtaggcgcgcggccgcggcggcggctggggagggttcttccggaaggttcgggaggcttctggaaaaagcgccgcgcgctgggcgggcccgtcgctatataaggcaggcgcgggggtggcgcgtcagttgcttcagcgtcccggtgtggctgtgccgttggtcctgtgcggtcacttagccaagatgcctgaggaaacccagacccaagaccaaccgatggaggaggaggaggttgagacgttcgcctttcaggcagaaattgcccagttgatgtcattgatcatcaatactttctactcgaacaaagagatctttctgagagagctcatttcaaattcatcagatgcattggacaaaatccggtatgaaagcttgacagatcccagtaaattagactctgggaaagagctgcatattaaccttataccgaacaaacaagatcgaactctcactattgtggatactggaattggaatgaccaaggctgacttgatcaataaccttggtactatcgccaagtctgggaccaaagcgttcatggaagctttgcaggctggtgcagatatctctatgattggccagttcggtgttggtttttattctgcttatttggttgctgagaaagtaactgtgatcaccaaacataacgatgatgagcagtacgcttgggagtcctcagcagggggatcattcacagtgaggacagacacaggtgaacctatgggtcgtggaacaaaagttatcctacacctgaaagaagaccaaactgagtacttggaggaacgaagaataaaggagattgtgaagaaacattctcagtttattggatatcccattactctttttgtggagaaggaacgtgataaagaagtaagcgatgatgaggctgaagaaaaggaagacaaagaagaagaaaaagaaaaagaagagaaagagtcggaagacaaacctgaaattgaagatgttggttctgatgaggaagaagaaaagaaggatggtgacaagaagaagaagaagaagattaaggaaaagtacatcgatcaagaagagctcaacaaaacaaagcccatctggaccagaaatcccgacgatattactaatgaggagtacggagaattctataagagcttgaccaatgactgggaagatcacttggcagtgaagcatttttcagttgaaggacagttggaattcagagcccttctatttgtcccacgacgtgctccttttgatctgtttgaaaacagaaagaaaaagaacaacatcaaattgtatgtacgcagagttttcatcatggataactgtgaggagctaatccctgaatatctgaacttcattagaggggtggtagactcggaggatctccctctaaacatatcccgtgagatgttgcaacaaagcaaaattttgaaagttatcaggaagaatttggtcaaaaaatgcttagaactctttactgaactggcggaagataaagagaactacaagaaattctatgagcagttctctaaaaacataaagcttggaatacacgaagactctcaaaatcggaagaagctttcagagctgttaaggtactacacatctgcctctggtgatgagatggtttctctcaaggactactgcaccagaatgaaggagaaccagaaacatatctattatatcacaggtgagaccaaggaccaggtagctaactcagcctttgtggaacgtcttcggaaacatggcttagaagtgatctatatgattgagcccattgatgagtactgtgtccaacagctgaaggaatttgaggggaagactttagtgtcagtcaccaaagaaggcctggaacttccagaggatgaagaagagaaaaagaagcaggaagagaaaaaaacaaagtttgagaacctctgcaaaatcatgaaagacatattggagaaaaaagttgaaaaggtggttgtgtcaaaccgattggtgacatctccatgctgtattgtcacaagcacatatggctggacagcaaacatggagagaatcatgaaagctcaagccctaagagacaactcaacaatgggttacatggcagcaaagaaacacctggagataaaccctgaccattccattattgagaccttaaggcaaaaggcagaggctgataagaacgacaagtctgtgaaggatctggtcatcttgctttatgaaactgcgctcctgtcttctggcttcagtctggaagatccccagacacatgctaacaggatctacaggatgatcaaacttggtctgggtattgatgaagatgaccctactgctgatgataccagtgctgctgtaactgaagaaatgccaccccttgaaggagatgacgacacatcacgcatggaagaagtagactaatctctggctgagggatgacttacctgttcagtactctacaattcctctgataatatattttcaaggatgtttttctttatttttgttaatattaaaaagtctgtatggcatgacaactactttaaggggaagataagatttctgtctactaagtgatgctgtgataccttaggcactaaagcagagctagtaatgctttttgagtttcatgttggtttattttcacagattggggtaacgtgcactgtaagacgtatgtaacatgatgttaactttgtggtctaaagtgtttagctgtcaagccggatgcctaagtagaccaaatcttgttattgaagtgttctgagctgtatcttgatgtttagaaaagtattcgttacatcttgtaggatctactttttgaacttttcattccctgtagttgacaattctgcatgtactagtcctctagaaataggttaaactgaagcaacttgatggaaggatctctccacagggcttgttttccaaagaaaagtattgtttggaggagcaaagttaaaagcctacctaagcatatcgtaaagctgttcaaaaataactcagacccagtcttgtggatggaaatgtagtgctcgagtcacattctgcttaaagttgtaacaaatacagatgagttaaaagatattgtgtgacagtgtcttatttagggggaaaggggagtatctggatgacagttagtgccaaaatgtaaaacatgaggcgctagcaggagatggttaaacactagctgctccaagggttgacatggtcttcccagcatgtactcagcaggtgtggggtggagcacacgtaggcacagaaaacaggaatgcagacaacatgcatcccctgcgtccatgagttacatgtgttctcttagtgtccacgttgttttgatgttattcatggaataccttctgtgttaaatacagtcacttaattccttggccttaaaa

SEQ ID NO: 140 - protein, 732 aa, Homo sapiens
  MISC_FEATURE (1)..(732): heat shock protein 90kDa alpha (cytosolic), class A member 1 isoform 2
MPEETQTQDQPMEEEEVETFAFQAEIAQLMSLIINTFYSNKEIFLRELISNSSDALDKIRYESLTDPSKLDSGKELHINLIPNKQDRTLTIVDTGIGMTKADLINNLGTIAKSGTKAFMEALQAGADISMIGQFGVGFYSAYLVAEKVTVITKHNDDEQYAWESSAGGSFTVRTDTGEPMGRGTKVILHLKEDQTEYLEERRIKEIVKKHSQFIGYPITLFVEKERDKEVSDDEAEEKEDKEEEKEKEEKESEDKPEIEDVGSDEEEEKKDGDKKKKKKIKEKYIDQEELNKTKPIWTRNPDDITNEEYGEFYKSLTNDWEDHLAVKHFSVEGQLEFRALLFVPRRAPFDLFENRKKKNNIKLYVRRVFIMDNCEELIPEYLNFIRGVVDSEDLPLNISREMLQQSKILKVIRKNLVKKCLELFTELAEDKENYKKFYEQFSKNIKLGIHEDSQNRKKLSELLRYYTSASGDEMVSLKDYCTRMKENQKHIYYITGETKDQVANSAFVERLRKHGLEVIYMIEPIDEYCVQQLKEFEGKTLVSVTKEGLELPEDEEEKKKQEEKKTKFENLCKIMKDILEKKVEKVVVSNRLVTSPCCIVTSTYGWTANMERIMKAQALRDNSTMGYMAAKKHLEINPDHSIIETLRQKAEADKNDKSVKDLVILLYETALLSSGFSLEDPQTHANRIYRMIKLGLGIDEDDPTADDTSAAVTEEMPPLEGDDDTSRMEEVD

SEQ ID NO: 141 - DNA, 2567 bp, Homo sapiens
  mRNA (1)..(2567): heat shock protein 90kDa alpha (cytosolic), class B member 1 (HSP90AB1)
ctccggcgcagtgttgggactgtctgggtatcggaaagcaagcctacgttgctcactattacgtataatccttttcttttcaagatgcctgaggaagtgcaccatggagaggaggaggtggagacttttgcctttcaggcagaaattgcccaactcatgtccctcatcatcaataccttctattccaacaaggagattttccttcgggagttgatctctaatgcttctgatgccttggacaagattcgctatgagagcctgacagacccttcgaagttggacagtggtaaagagctgaaaattgacatcatccccaaccctcaggaacgtaccctgactttggtagacacaggcattggcatgaccaaagctgatctcataaataatttgggaaccattgccaagtctggtactaaagcattcatggaggctcttcaggctggtgcagacatctccatgattgggcagtttggtgttggcttttattctgcctacttggtggcagagaaagtggttgtgatcacaaagcacaacgatgatgaacagtatgcttgggagtcttctgctggaggttccttcactgtgcgtgctgaccatggtgagcccattggcaggggtaccaaagtgatcctccatcttaaagaagatcagacagagtacctagaagagaggcgggtcaaagaagtagtgaagaagcattctcagttcataggctatcccatcaccctttatttggagaaggaacgagagaaggaaattagtgatgatgaggcagaggaagagaaaggtgagaaagaagaggaagataaagatgatgaagaaaaacccaagatcgaagatgtgggttcagatgaggaggatgacagcggtaaggataagaagaagaaaactaagaagatcaaagagaaatacattgatcaggaagaactaaacaagaccaagcctatttggaccagaaaccctgatgacatcacccaagaggagtatggagaattctacaagagcctcactaatgactgggaagaccacttggcagtcaagcacttttctgtagaaggtcagttggaattcagggcattgctatttattcctcgtcgggctccctttgacctttttgagaacaagaagaaaaagaacaacatcaaactctatgtccgccgtgtgttcatcatggacagctgtgatgagttgataccagagtatctcaattttatccgtggtgtggttgactctgaggatctgcccctgaacatctcccgagaaatgctccagcagagcaaaatcttgaaagtcattcgcaaaaacattgttaagaagtgccttgagctcttctctgagctggcagaagacaaggagaattacaagaaattctatgaggcattctctaaaaatctcaagcttggaatccacgaagactccactaaccgccgccgcctgtctgagctgctgcgctatcatacctcccagtctggagatgagatgacatctctgtcagagtatgtttctcgcatgaaggagacacagaagtccatctattacatcactggtgagagcaaagagcaggtggccaactcagcttttgtggagcgagtgcggaaacggggcttcgaggtggtatatatgaccgagcccattgacgagtactgtgtgcagcagctcaaggaatttgatgggaagagcctggtctcagttaccaaggagggtctggagctgcctgaggatgaggaggagaagaagaagatggaagagagcaaggcaaagtttgagaacctctgcaagctcatgaaagaaatcttagataagaaggttgagaaggtgacaatctccaatagacttgtgtcttcaccttgctgcattgtgaccagcacctacggctggacagccaatatggagcggatcatgaaagcccaggcacttcgggacaactccaccatgggctatatgatggccaaaaagcacctggagatcaaccctgaccaccccattgtggagacgctgcggcagaaggctgaggccgacaagaatgataaggcagttaaggacctggtggtgctgctgtttgaaaccgccctgctatcttctggcttttcccttgaggatccccagacccactccaaccgcatctatcgcatgatcaagctaggtctaggtattgatgaagatgaagtggcagcagaggaacccaatgctgcagttcctgatgagatcccccctctcgagggcgatgaggatgcgtctcgcatggaagaagtcgattaggttaggagttcatagttggaaaacttgtgcccttgtatagtgtccccatgggctcccactgcagcctcgagtgcccctgtcccacctggctccccctgctggtgtctagtgtttttttccctctcctgtccttgtgttgaaggcagtaaactaagggtgtcaagccccattccctctctactcttgacagcaggattggatgttgtgtattgtggtttattttattttcttcattttgttctgaaattaaagtatgcaaaataaagaatatgccgttttaaaaaaaaaaaaaaaaaaaaaaaaaaaaa

SEQ ID NO: 142 - protein, 724 aa, Homo sapiens
  MISC_FEATURE (1)..(724): heat shock 90kDa protein  1
MPEEVHHGEEEVETFAFQAEIAQLMSLIINTFYSNKEIFLRELISNASDALDKIRYESLTDPSKLDSGKELKIDIIPNPQERTLTLVDTGIGMTKADLINNLGTIAKSGTKAFMEALQAGADISMIGQFGVGFYSAYLVAEKVVVITKHNDDEQYAWESSAGGSFTVRADHGEPIGRGTKVILHLKEDQTEYLEERRVKEVVKKHSQFIGYPITLYLEKEREKEISDDEAEEEKGEKEEEDKDDEEKPKIEDVGSDEEDDSGKDKKKKTKKIKEKYIDQEELNKTKPIWTRNPDDITQEEYGEFYKSLTNDWEDHLAVKHFSVEGQLEFRALLFIPRRAPFDLFENKKKKNNIKLYVRRVFIMDSCDELIPEYLNFIRGVVDSEDLPLNISREMLQQSKILKVIRKNIVKKCLELFSELAEDKENYKKFYEAFSKNLKLGIHEDSTNRRRLSELLRYHTSQSGDEMTSLSEYVSRMKETQKSIYYITGESKEQVANSAFVERVRKRGFEVVYMTEPIDEYCVQQLKEFDGKSLVSVTKEGLELPEDEEEKKKMEESKAKFENLCKLMKEILDKKVEKVTISNRLVSSPCCIVTSTYGWTANMERIMKAQALRDNSTMGYMMAKKHLEINPDHPIVETLRQKAEADKNDKAVKDLVVLLFETALLSSGFSLEDPQTHSNRIYRMIKLGLGIDEDEVAAEEPNAAVPDEIPPLEGDEDASRMEEVD

SEQ ID NO: 143 - DNA, 2780 bp, Homo sapiens
  mRNA (1)..(2780): heat shock protein 90kDa beta (Grp94), member 1 (HSP90B1)
gtgggcggaccgcgcggctggaggtgtgaggatccgaacccaggggtggggggtggaggcggctcctgcgatcgaaggggacttgagactcaccggccgcacgccatgagggccctgtgggtgctgggcctctgctgcgtcctgctgaccttcgggtcggtcagagctgacgatgaagttgatgtggatggtacagtagaagaggatctgggtaaaagtagagaaggatcaaggacggatgatgaagtagtacagagagaggaagaagctattcagttggatggattaaatgcatcacaaataagagaacttagagagaagtcggaaaagtttgccttccaagccgaagttaacagaatgatgaaacttatcatcaattcattgtataaaaataaagagattttcctgagagaactgatttcaaatgcttctgatgctttagataagataaggctaatatcactgactgatgaaaatgctctttctggaaatgaggaactaacagtcaaaattaagtgtgataaggagaagaacctgctgcatgtcacagacaccggtgtaggaatgaccagagaagagttggttaaaaaccttggtaccatagccaaatctgggacaagcgagtttttaaacaaaatgactgaagcacaggaagatggccagtcaacttctgaattgattggccagtttggtgtcggtttctattccgccttccttgtagcagataaggttattgtcacttcaaaacacaacaacgatacccagcacatctgggagtctgactccaatgaattttctgtaattgctgacccaagaggaaacactctaggacggggaacgacaattacccttgtcttaaaagaagaagcatctgattaccttgaattggatacaattaaaaatctcgtcaaaaaatattcacagttcataaactttcctatttatgtatggagcagcaagactgaaactgttgaggagcccatggaggaagaagaagcagccaaagaagagaaagaagaatctgatgatgaagctgcagtagaggaagaagaagaagaaaagaaaccaaagactaaaaaagttgaaaaaactgtctgggactgggaacttatgaatgatatcaaaccaatatggcagagaccatcaaaagaagtagaagaagatgaatacaaagctttctacaaatcattttcaaaggaaagtgatgaccccatggcttatattcactttactgctgaaggggaagttaccttcaaatcaattttatttgtacccacatctgctccacgtggtctgtttgacgaatatggatctaaaaagagcgattacattaagctctatgtgcgccgtgtattcatcacagacgacttccatgatatgatgcctaaatacctcaattttgtcaagggtgtggtggactcagatgatctccccttgaatgtttcccgcgagactcttcagcaacataaactgcttaaggtgattaggaagaagcttgttcgtaaaacgctggacatgatcaagaagattgctgatgataaatacaatgatactttttggaaagaatttggtaccaacatcaagcttggtgtgattgaagaccactcgaatcgaacacgtcttgctaaacttcttaggttccagtcttctcatcatccaactgacattactagcctagaccagtatgtggaaagaatgaaggaaaaacaagacaaaatctacttcatggctgggtccagcagaaaagaggctgaatcttctccatttgttgagcgacttctgaaaaagggctatgaagttatttacctcacagaacctgtggatgaatactgtattcaggcccttcccgaatttgatgggaagaggttccagaatgttgccaaggaaggagtgaagttcgatgaaagtgagaaaactaaggagagtcgtgaagcagttgagaaagaatttgagcctctgctgaattggatgaaagataaagcccttaaggacaagattgaaaaggctgtggtgtctcagcgcctgacagaatctccgtgtgctttggtggccagccagtacggatggtctggcaacatggagagaatcatgaaagcacaagcgtaccaaacgggcaaggacatctctacaaattactatgcgagtcagaagaaaacatttgaaattaatcccagacacccgctgatcagagacatgcttcgacgaattaaggaagatgaagatgataaaacagttttggatcttgctgtggttttgtttgaaacagcaacgcttcggtcagggtatcttttaccagacactaaagcatatggagatagaatagaaagaatgcttcgcctcagtttgaacattgaccctgatgcaaaggtggaagaagagcccgaagaagaacctgaagagacagcagaagacacaacagaagacacagagcaagacgaagatgaagaaatggatgtgggaacagatgaagaagaagaaacagcaaaggaatctacagctgaaaaagatgaattgtaaattatactctcaccatttggatcctgtgtggagagggaatgtgaaatttacatcatttctttttgggagagacttgttttggatgccccctaatccccttctcccctgcactgtaaaatgtgggattatgggtcacaggaaaaagtgggttttttagttgaattttttttaacattcctcatgaatgtaaatttgtactatttaactgactattcttgatgtaaaatcttgtcatgtgtataaaaataaaaaagatcccaaat

SEQ ID NO: 144 - protein, 803 aa, Homo sapiens
  MISC_FEATURE (1)..(803): heat shock protein 90kDa beta, member 1
MRALWVLGLCCVLLTFGSVRADDEVDVDGTVEEDLGKSREGSRTDDEVVQREEEAIQLDGLNASQIRELREKSEKFAFQAEVNRMMKLIINSLYKNKEIFLRELISNASDALDKIRLISLTDENALSGNEELTVKIKCDKEKNLLHVTDTGVGMTREELVKNLGTIAKSGTSEFLNKMTEAQEDGQSTSELIGQFGVGFYSAFLVADKVIVTSKHNNDTQHIWESDSNEFSVIADPRGNTLGRGTTITLVLKEEASDYLELDTIKNLVKKYSQFINFPIYVWSSKTETVEEPMEEEEAAKEEKEESDDEAAVEEEEEEKKPKTKKVEKTVWDWELMNDIKPIWQRPSKEVEEDEYKAFYKSFSKESDDPMAYIHFTAEGEVTFKSILFVPTSAPRGLFDEYGSKKSDYIKLYVRRVFITDDFHDMMPKYLNFVKGVVDSDDLPLNVSRETLQQHKLLKVIRKKLVRKTLDMIKKIADDKYNDTFWKEFGTNIKLGVIEDHSNRTRLAKLLRFQSSHHPTDITSLDQYVERMKEKQDKIYFMAGSSRKEAESSPFVERLLKKGYEVIYLTEPVDEYCIQALPEFDGKRFQNVAKEGVKFDESEKTKESREAVEKEFEPLLNWMKDKALKDKIEKAVVSQRLTESPCALVASQYGWSGNMERIMKAQAYQTGKDISTNYYASQKKTFEINPRHPLIRDMLRRIKEDEDDKTVLDLAVVLFETATLRSGYLLPDTKAYGDRIERMLRLSLNIDPDAKVEEEPEEEPEETAEDTTEDTEQDEDEEMDVGTDEEEETAKESTAEKDEL

SEQ ID NO: 145 - DNA, 3218 bp, Homo sapiens
  mRNA (1)..(3218): heat shock protein 90kDa alpha (cytosolic), class A member 2 (HSP90AA2)
aattaattttgattacatttaaaattctatatggcaaaaataccataattaaagataaaaggcaaagaacaaattgggaaaaatatttttcaacatatataaccaagggctaatttctctaacacctaaaaagttcttataaatcaataaaaagaaaaccaacatctcaatggaaaaagaacaaagctcataaagagttcacagaaaaaggatatacaaatggctttaaacatgtgaaagaatgttcaacttcactcacaataagaaaaaatacaaattatgagttgcttcagcatcctggtgttgctgtgccgtgggtcctgtgcggtcacttagccaagatgcctgaggaaacccagacccaagaccaaccgatggaggaggaggaggttgagacattcgcctttcaggcagaaattgcccagttgatgtcattgatcatcaatactttctactcgaacaaagagatctttctgagagagctcatttcaaattcatcagatgcattggacaaaatctggtatgaaagcttgacagatcccagtaaattagactctgggaaagagctgcatattaaccttataccaaacaaacaagatcaaactctcactattgtggatactggaattggaatgaccaaggctgacttgatcaataaccttggtactatcgccaagtctgggaccaaagcgttcatggaagctttgcaggctggtgcagatatctctatgattggccagttcggtgttagtttttattctgcttatttggttgctgagaaagtaactgtgatcaccaaacataatgatgatgagcagtacgcctgggagtcctcagcagggggatcattcacagtgaggacagacacaggtgaacgtatgggtcgtggaacaaaggttatcctacacctgaaagaagaccaaactgagtacttggaggaacaaagaataaaggagattgtgaagaaacattctcagcttattggatatcccattactctttttgtggagaaggaatgtgataaagaagtcagcgacgatgagactgaagaaaaggaagacaaagaagaagaaaaagaaaaagaagagaaagagtccaaagacaaacctgaaattgaagatgttggttctgatgaggaagaagaaaagaaggatggtgacaagaagaagaagaagactaaggaaaagtacatcgaccaagaagaactcaacaaaacaaagcccatctggaccagaaatcccgacgatattactaatgaggagtacggagaattctgcaagaacttgaccaatgactgggaagatcacttggcagtgaagcatttttcagttgaaggacagttggaattcagagcccttctatttgtcccatgacgtgctccttttgacctgtttgaaaacagaaagaaaaagaacaacatcaaattgtatgtacgcagagatttcatcatggataactgtgaggagctaatccctgaatatctgaacttcattagaggggtggtagactcggaggatctccctctaaacatttcccgtgagatgttgcaacaaagtaaaattttgaaagttatcaggaaaaatttggtcaaaaaatgcttagaactctttacagaactggcggaagataaagagaactgcaagaaattctatgagcagttctctaaaaacataaagcttggaatacaagaagactctcaaaatcggaagaagctttcagagctgttaaggtactacacgtctgcctctggtgatgagatggtttctctcaaggactactgcaccagaatgaaggaaaaacagaaacatatctattatatcacaggtgagaccaaggaccaggtagctaactcagcctttgtggaacgtcttgggaaacatggcttagaagtgatctatatgattgagcccattgatgagtactgtgtccaacagctgaaggaatttgaggggaagactttagtgccagtcaccaaagaaggcctggaacttccagaggatgaagaaaagaaaaagaaataggaagagaaaaaacaatgtttgagaacctctgcaaaaccatgaaagacatattggagaaaaaagttgaaaaggtggttgtgtcaaaccgattggtgacgtctccatgctgtattgtcacaagcacatatggctggacagaaaacatggagagaatcatgaaagctcaagccctaagagacaactcaacaatgggttatatggcagccaagaaacacctggagataaatcctgatgattccattattgagaccttaaggcaaaaggcagaggctgataagaatgacaagtctgtgaaggatctgctcatcttgctttacgaaactgcactcctgtcttctggcttcagtctggaagatccccagacacatgctaacaggacctacaggatgatcaaacttggtctgggtattgatgaagatgatcctgctgctgatgataccagtgctgctgtaactgaagaaatgccgcccctcgaaggagatgacgacacatcatgcatggaagaagtagactaacctctggctaagggatgacttaactgttcaatactctacaattcctccgataatatatattcaaggatgtttttctttatttttgttaatattaaaaagtctgtacggcatgacaacaactactttaaggggaagataagatttctgtctactaagtgatgctgtgataccttaggcactaaagcagagctagtaatgctttttgagtttcacgtcggtttattttcacagattggggtaacgtgcgttgtaagatgtatgtaacatgatgttaactttgtggtctaaagtgtttagctgtcaagccggattcctaagtagaccaaatcttgttatcgaagtgttcctgagctataccttgatgtttagaaaagtatttgttacatcttgtaggatctactttttgaacttttcatcccctatagttgacaattctgcatgtactagtcctctagaaataggttaaactgaagcaacttgatggaaggatctctccacagggcttgttttccaaagaaaagtattgtttggaggagcaaagttataagcctacctaagcatatcataaagctgtttaaaaataactcagacccggtcttgtggatggaaatgtagtgctcgagtcacattcttcttatagttgtaacaaatacagatgagttaaaagaaaaaaaaagaaaaa

SEQ ID NO: 146 - protein, 343 aa, Homo sapiens
  MISC_FEATURE (1)..(343): heat shock 90kDa protein 1, alpha-like 3
MPEETQTQDQPMEEEEVETFAFQAEIAQLMSLIINTFYSNKEIFLRELISNSSDALDKIWYESLTDPSKLDSGKELHINLIPNKQDQTLTIVDTGIGMTKADLINNLGTIAKSGTKAFMEALQAGADISMIGQFGVSFYSAYLVAEKVTVITKHNDDEQYAWESSAGGSFTVRTDTGERMGRGTKVILHLKEDQTEYLEEQRIKEIVKKHSQLIGYPITLFVEKECDKEVSDDETEEKEDKEEEKEKEEKESKDKPEIEDVGSDEEEEKKDGDKKKKKTKEKYIDQEELNKTKPIWTRNPDDITNEEYGEFCKNLTNDWEDHLAVKHFSVEGQLEFRALLFVP

SEQ ID NO: 147 - DNA, 2949 bp, Homo sapiens
  mRNA (1)..(2949): v-raf murine sarcoma viral oncogene homolog B1 (BRAF)
  CDS (62)..(2362)
cgcctcccttccccctccccgcccgacagcggccgctcgggccccggctctcggttataagatggcggcgctgagcggtggcggtggtggcggcgcggagccgggccaggctctgttcaacggggacatggagcccgaggccggcgccggcgccggcgccgcggcctcttcggctgcggaccctgccattccggaggaggtgtggaatatcaaacaaatgattaagttgacacaggaacatatagaggccctattggacaaatttggtggggagcataatccaccatcaatatatctggaggcctatgaagaatacaccagcaagctagatgcactccaacaaagagaacaacagttattggaatctctggggaacggaactgatttttctgtttctagctctgcatcaatggataccgttacatcttcttcctcttctagcctttcagtgctaccttcatctctttcagtttttcaaaatcccacagatgtggcacggagcaaccccaagtcaccacaaaaacctatcgttagagtcttcctgcccaacaaacagaggacagtggtacctgcaaggtgtggagttacagtccgagacagtctaaagaaagcactgatgatgagaggtctaatcccagagtgctgtgctgtttacagaattcaggatggagagaagaaaccaattggttgggacactgatatttcctggcttactggagaagaattgcatgtggaagtgttggagaatgttccacttacaacacacaactttgtacgaaaaacgtttttcaccttagcattttgtgacttttgtcgaaagctgcttttccagggtttccgctgtcaaacatgtggttataaatttcaccagcgttgtagtacagaagttccactgatgtgtgttaattatgaccaacttgatttgctgtttgtctccaagttctttgaacaccacccaataccacaggaagaggcgtccttagcagagactgccctaacatctggatcatccccttccgcacccgcctcggactctattgggccccaaattctcaccagtccgtctccttcaaaatccattccaattccacagcccttccgaccagcagatgaagatcatcgaaatcaatttgggcaacgagaccgatcctcatcagctcccaatgtgcatataaacacaatagaacctgtcaatattgatgacttgattagagaccaaggatttcgtggtgatggaggatcaaccacaggtttgtctgctaccccccctgcctcattacctggctcactaactaacgtgaaagccttacagaaatctccaggacctcagcgagaaaggaagtcatcttcatcctcagaagacaggaatcgaatgaaaacacttggtagacgggactcgagtgatgattgggagattcctgatgggcagattacagtgggacaaagaattggatctggatcatttggaacagtctacaagggaaagtggcatggtgatgtggcagtgaaaatgttgaatgtgacagcacctacacctcagcagttacaagccttcaaaaatgaagtaggagtactcaggaaaacacgacatgtgaatatcctactcttcatgggctattccacaaagccacaactggctattgttacccagtggtgtgagggctccagcttgtatcaccatctccatatcattgagaccaaatttgagatgatcaaacttatagatattgcacgacagactgcacagggcatggattacttacacgccaagtcaatcatccacagagacctcaagagtaataatatatttcttcatgaagacctcacagtaaaaataggtgattttggtctagctacagtgaaatctcgatggagtgggtcccatcagtttgaacagttgtctggatccattttgtggatggcaccagaagtcatcagaatgcaagataaaaatccatacagctttcagtcagatgtatatgcatttggaattgttctgtatgaattgatgactggacagttaccttattcaaacatcaacaacagggaccagataatttttatggtgggacgaggatacctgtctccagatctcagtaaggtacggagtaactgtccaaaagccatgaagagattaatggcagagtgcctcaaaaagaaaagagatgagagaccactctttccccaaattctcgcctctattgagctgctggcccgctcattgccaaaaattcaccgcagtgcatcagaaccctccttgaatcgggctggtttccaaacagaggattttagtctatatgcttgtgcttctccaaaaacacccatccaggcagggggatatggtgcgtttcctgtccactgaaacaaatgagtgagagagttcaggagagtagcaacaaaaggaaaataaatgaacatatgtttgcttatatgttaaattgaataaaatactctctttttttttaaggtgaaccaaagaacacttgtgtggttaaagactagatataatttttccccaaactaaaatttatacttaacattggatttttaacatccaagggttaaaatacatagacattgctaaaaattggcagagcctcttctagaggctttactttctgttccgggtttgtatcattcacttggttattttaagtagtaaacttcagtttctcatgcaacttttgttgccagctatcacatgtccactagggactccagaagaagaccctacctatgcctgtgtttgcaggtgagaagttggcagtcggttagcctgggttagataaggcaaactgaacagatctaatttaggaagtcagtagaatttaataattctattattattcttaataatttttctataactatttctttttataacaatttggaaaatgtggatgtcttttatttccttgaagcaataaactaagtttctttttataaaaa

SEQ ID NO: 148 - protein, 766 aa, Homo sapiens [sequence omitted]

SEQ ID NO: 149 - DNA, 5616 bp, Homo sapiens
  mRNA (1)..(5616): epidermal growth factor receptor (erythroblastic leukemia viral (v-erb-b) oncogene homolog, avian) (EGFR), transcript variant 1 (isoform a)
  CDS (247)..(3879)
ccccggcgcagcgcggccgcagcagcctccgccccccgcacggtgtgagcgcccgacgcggccgaggcggccggagtcccgagctagccccggcggccgccgccgcccagaccggacgacaggccacctcgtcggcgtccgcccgagtccccgcctcgccgccaacgccacaaccaccgcgcacggccccctgactccgtccagtattgatcgggagagccggagcgagctcttcggggagcagcgatgcgaccctccgggacggccggggcagcgctcctggcgctgctggctgcgctctgcccggcgagtcgggctctggaggaaaagaaagtttgccaaggcacgagtaacaagctcacgcagttgggcacttttgaagatcattttctcagcctccagaggatgttcaataactgtgaggtggtccttgggaatttggaaattacctatgtgcagaggaattatgatctttccttcttaaagaccatccaggaggtggctggttatgtcctcattgccctcaacacagtggagcgaattcctttggaaaacctgcagatcatcagaggaaatatgtactacgaaaattcctatgccttagcagtcttatctaactatgatgcaaataaaaccggactgaaggagctgcccatgagaaatttacaggaaatcctgcatggcgccgtgcggttcagcaacaaccctgccctgtgcaacgtggagagcatccagtggcgggacatagtcagcagtgactttctcagcaacatgtcgatggacttccagaaccacctgggcagctgccaaaagtgtgatccaagctgtcccaatgggagctgctggggtgcaggagaggagaactgccagaaactgaccaaaatcatctgtgcccagcagtgctccgggcgctgccgtggcaagtcccccagtgactgctgccacaaccagtgtgctgcaggctgcacaggcccccgggagagcgactgcctggtctgccgcaaattccgagacgaagccacgtgcaaggacacctgccccccactcatgctctacaaccccaccacgtaccagatggatgtgaaccccgagggcaaatacagctttggtgccacctgcgtgaagaagtgtccccgtaattatgtggtgacagatcacggctcgtgcgtccgagcctgtggggccgacagctatgagatggaggaagacggcgtccgcaagtgtaagaagtgcgaagggccttgccgcaaagtgtgtaacggaataggtattggtgaatttaaagactcactctccataaatgctacgaatattaaacacttcaaaaactgcacctccatcagtggcgatctccacatcctgccggtggcatttaggggtgactccttcacacatactcctcctctggatccacaggaactggatattctgaaaaccgtaaaggaaatcacagggtttttgctgattcaggcttggcctgaaaacaggacggacctccatgcctttgagaacctagaaatcatacgcggcaggaccaagcaacatggtcagttttctcttgcagtcgtcagcctgaacataacatccttgggattacgctccctcaaggagataagtgatggagatgtgataatttcaggaaacaaaaatttgtgctatgcaaatacaataaactggaaaaaactgtttgggacctccggtcagaaaaccaaaattataagcaacagaggtgaaaacagctgcaaggccacaggccaggtctgccatgccttgtgctcccccgagggctgctggggcccggagcccagggactgcgtctcttgccggaatgtcagccgaggcagggaatgcgtggacaagtgcaaccttctggagggtgagccaagggagtttgtggagaactctgagtgcatacagtgccacccagagtgcctgcctcaggccatgaacatcacctgcacaggacggggaccagacaactgtatccagtgtgcccactacattgacggcccccactgcgtcaagacctgcccggcaggagtcatgggagaaaacaacaccctggtctggaagtacgcagacgccggccatgtgtgccacctgtgccatccaaactgcacctacggatgcactgggccaggtcttgaaggctgtccaacgaatgggcctaagatcccgtccatcgccactgggatggtgggggccctcctcttgctgctggtggtggccctggggatcggcctcttcatgcgaaggcgccacatcgttcggaagcgcacgctgcggaggctgctgcaggagagggagcttgtggagcctcttacacccagtggagaagctcccaaccaagctctcttgaggatcttgaaggaaactgaattcaaaaagatcaaagtgctgggctccggtgcgttcggcacggtgtataagggactctggatcccagaaggtgagaaagttaaaattcccgtcgctatcaaggaattaagagaagcaacatctccgaaagccaacaaggaaatcctcgatgaagcctacgtgatggccagcgtggacaacccccacgtgtgccgcctgctgggcatctgcctcacctccaccgtgcagctcatcacgcagctcatgcccttcggctgcctcctggactatgtccgggaacacaaagacaatattggctcccagtacctgctcaactggtgtgtgcagatcgcaaagggcatgaactacttggaggaccgtcgcttggtgcaccgcgacctggcagccaggaacgtactggtgaaaacaccgcagcatgtcaagatcacagattttgggctggccaaactgctgggtgcggaagagaaagaataccatgcagaaggaggcaaagtgcctatcaagtggatggcattggaatcaattttacacagaatctatacccaccagagtgatgtctggagctacggggtgaccgtttgggagttgatgacctttggatccaagccatatgacggaatccctgccagcgagatctcctccatcctggagaaaggagaacgcctccctcagccacccatatgtaccatcgatgtctacatgatcatggtcaagtgctggatgatagacgcagatagtcgcccaaagttccgtgagttgatcatcgaattctccaaaatggcccgagacccccagcgctaccttgtcattcagggggatgaaagaatgcatttgccaagtcctacagactccaacttctaccgtgccctgatggatgaagaagacatggacgacgtggtggatgccgacgagtacctcatcccacagcagggcttcttcagcagcccctccacgtcacggactcccctcctgagctctctgagtgcaaccagcaacaattccaccgtggcttgcattgatagaaatgggctgcaaagctgtcccatcaaggaagacagcttcttgcagcgatacagctcagaccccacaggcgccttgactgaggacagcatagacgacaccttcctcccagtgcctgaatacataaaccagtccgttcccaaaaggcccgctggctctgtgcagaatcctgtctatcacaatcagcctctgaaccccgcgcccagcagagacccacactaccaggacccccacagcactgcagtgggcaaccccgagtatctcaacactgtccagcccacctgtgtcaacagcacattcgacagccctgcccactgggcccagaaaggcagccaccaaattagcctggacaaccctgactaccagcaggacttctttcccaaggaagccaagccaaatggcatctttaagggctccacagctgaaaatgcagaatacctaagggtcgcgccacaaagcagtgaatttattggagcatgaccacggaggatagtatgagccctaaaaatccagactctttcgatacccaggaccaagccacagcaggtcctccatcccaacagccatgcccgcattagctcttagacccacagactggttttgcaacgtttacaccgactagccaggaagtacttccacctcgggcacattttgggaagttgcattcctttgtcttcaaactgtgaagcatttacagaaacgcatccagcaagaatattgtccctttgagcagaaatttatctttcaaagaggtatatttgaaaaaaaaaaaaagtatatgtgaggatttttattgattggggatcttggagtttttcattgtcgctattgatttttacttcaatgggctcttccaacaaggaagaagcttgctggtagcacttgctaccctgagttcatccaggcccaactgtgagcaaggagcacaagccacaagtcttccagaggatgcttgattccagtggttctgcttcaaggcttccactgcaaaacactaaagatccaagaaggccttcatggccccagcaggccggatcggtactgtatcaagtcatggcaggtacagtaggataagccactctgtcccttcctgggcaaagaagaaacggaggggatggaattcttccttagacttacttttgtaaaaatgtccccacggtacttactccccactgatggaccagtggtttccagtcatgagcgttagactgacttgtttgtcttccattccattgttttgaaactcagtatgctgcccctgtcttgctgtcatgaaatcagcaagagaggatgacacatcaaataataactcggattccagcccacattggattcatcagcatttggaccaatagcccacagctgagaatgtggaatacctaaggatagcaccgcttttgttctcgcaaaaacgtatctcctaatttgaggctcagatgaaatgcatcaggtcctttggggcatagatcagaagactacaaaaatgaagctgctctgaaatctcctttagccatcaccccaaccccccaaaattagtttgtgttacttatggaagatagttttctccttttacttcacttcaaaagctttttactcaaagagtatatgttccctccaggtcagctgcccccaaaccccctccttacgctttgtcacacaaaaagtgtctctgccttgagtcatctattcaagcacttacagctctggccacaacagggcattttacaggtgcgaatgacagtagcattatgagtagtgtggaattcaggtagtaaatatgaaactagggtttgaaattgataatgctttcacaacatttgcagatgttttagaaggaaaaaagttccttcctaaaataatttctctacaattggaagattggaagattcagctagttaggagcccaccttttttcctaatctgtgtgtgccctgtaacctgactggttaacagcagtcctttgtaaacagtgttttaaactctcctagtcaatatccaccccatccaatttatcaaggaagaaatggttcagaaaatattttcagcctacagttatgttcagtcacacacacatacaaaatgttccttttgcttttaaagtaatttttgactcccagatcagtcagagcccctacagcattgttaagaaagtatttgatttttgtctcaatgaaaataaaactatattcatttccactctaaaaaaaaaaaaaaaaa

SEQ ID NO: 150 - protein, 1210 aa, Homo sapiens [sequence omitted]

SEQ ID NO: 151 - DNA, 2239 bp, Homo sapiens
  mRNA (1)..(2239): epidermal growth factor receptor (erythroblastic leukemia viral (v-erb-b) oncogene homolog, avian) (EGFR), transcript variant 2 (isoform b)
  CDS (247)..(2133)
ccccggcgcagcgcggccgcagcagcctccgccccccgcacggtgtgagcgcccgacgcggccgaggcggccggagtcccgagctagccccggcggccgccgccgcccagaccggacgacaggccacctcgtcggcgtccgcccgagtccccgcctcgccgccaacgccacaaccaccgcgcacggccccctgactccgtccagtattgatcgggagagccggagcgagctcttcggggagcagcgatgcgaccctccgggacggccggggcagcgctcctggcgctgctggctgcgctctgcccggcgagtcgggctctggaggaaaagaaagtttgccaaggcacgagtaacaagctcacgcagttgggcacttttgaagatcattttctcagcctccagaggatgttcaataactgtgaggtggtccttgggaatttggaaattacctatgtgcagaggaattatgatctttccttcttaaagaccatccaggaggtggctggttatgtcctcattgccctcaacacagtggagcgaattcctttggaaaacctgcagatcatcagaggaaatatgtactacgaaaattcctatgccttagcagtcttatctaactatgatgcaaataaaaccggactgaaggagctgcccatgagaaatttacaggaaatcctgcatggcgccgtgcggttcagcaacaaccctgccctgtgcaacgtggagagcatccagtggcgggacatagtcagcagtgactttctcagcaacatgtcgatggacttccagaaccacctgggcagctgccaaaagtgtgatccaagctgtcccaatgggagctgctggggtgcaggagaggagaactgccagaaactgaccaaaatcatctgtgcccagcagtgctccgggcgctgccgtggcaagtcccccagtgactgctgccacaaccagtgtgctgcaggctgcacaggcccccgggagagcgactgcctggtctgccgcaaattccgagacgaagccacgtgcaaggacacctgccccccactcatgctctacaaccccaccacgtaccagatggatgtgaaccccgagggcaaatacagctttggtgccacctgcgtgaagaagtgtccccgtaattatgtggtgacagatcacggctcgtgcgtccgagcctgtggggccgacagctatgagatggaggaagacggcgtccgcaagtgtaagaagtgcgaagggccttgccgcaaagtgtgtaacggaataggtattggtgaatttaaagactcactctccataaatgctacgaatattaaacacttcaaaaactgcacctccatcagtggcgatctccacatcctgccggtggcatttaggggtgactccttcacacatactcctcctctggatccacaggaactggatattctgaaaaccgtaaaggaaatcacagggtttttgctgattcaggcttggcctgaaaacaggacggacctccatgcctttgagaacctagaaatcatacgcggcaggaccaagcaacatggtcagttttctcttgcagtcgtcagcctgaacataacatccttgggattacgctccctcaaggagataagtgatggagatgtgataatttcaggaaacaaaaatttgtgctatgcaaatacaataaactggaaaaaactgtttgggacctccggtcagaaaaccaaaattataagcaacagaggtgaaaacagctgcaaggccacaggccaggtctgccatgccttgtgctcccccgagggctgctggggcccggagcccagggactgcgtctcttgccggaatgtcagccgaggcagggaatgcgtggacaagtgcaaccttctggagggtgagccaagggagtttgtggagaactctgagtgcatacagtgccacccagagtgcctgcctcaggccatgaacatcacctgcacaggacggggaccagacaactgtatccagtgtgcccactacattgacggcccccactgcgtcaagacctgcccggcaggagtcatgggagaaaacaacaccctggtctggaagtacgcagacgccggccatgtgtgccacctgtgccatccaaactgcacctacgggtcctaataaatcttcactgtctgactttagtctcccactaaaactgcatttcctttctacaatttcaatttctccctttgcttcaaataaagtcctgacactattcatttga

SEQ ID NO: 152 - protein, 628 aa, Homo sapiens
MRPSGTAGAALLALLAALCPASRALEEKKVCQGTSNKLTQLGTFEDHFLSLQRMFNNCEVVLGNLEITYVQRNYDLSFLKTIQEVAGYVLIALNTVERIPLENLQIIRGNMYYENSYALAVLSNYDANKTGLKELPMRNLQEILHGAVRFSNNPALCNVESIQWRDIVSSDFLSNMSMDFQNHLGSCQKCDPSCPNGSCWGAGEENCQKLTKIICAQQCSGRCRGKSPSDCCHNQCAAGCTGPRESDCLVCRKFRDEATCKDTCPPLMLYNPTTYQMDVNPEGKYSFGATCVKKCPRNYVVTDHGSCVRACGADSYEMEEDGVRKCKKCEGPCRKVCNGIGIGEFKDSLSINATNIKHFKNCTSISGDLHILPVAFRGDSFTHTPPLDPQELDILKTVKEITGFLLIQAWPENRTDLHAFENLEIIRGRTKQHGQFSLAVVSLNITSLGLRSLKEISDGDVIISGNKNLCYANTINWKKLFGTSGQKTKIISNRGENSCKATGQVCHALCSPEGCWGPEPRDCVSCRNVSRGRECVDKCNLLEGEPREFVENSECIQCHPECLPQAMNITCTGRGPDNCIQCAHYIDGPHCVKTCPAGVMGENNTLVWKYADAGHVCHLCHPNCTYGS

SEQ ID NO: 153 - DNA, 1595 bp, Homo sapiens
  mRNA (1)..(1595): epidermal growth factor receptor (erythroblastic leukemia viral (v-erb-b) oncogene homolog, avian) (EGFR), transcript variant 3 (isoform c)
  CDS (247)..(1464)
ccccggcgcagcgcggccgcagcagcctccgccccccgcacggtgtgagcgcccgacgcggccgaggcggccggagtcccgagctagccccggcggccgccgccgcccagaccggacgacaggccacctcgtcggcgtccgcccgagtccccgcctcgccgccaacgccacaaccaccgcgcacggccccctgactccgtccagtattgatcgggagagccggagcgagctcttcggggagcagcgatgcgaccctccgggacggccggggcagcgctcctggcgctgctggctgcgctctgcccggcgagtcgggctctggaggaaaagaaagtttgccaaggcacgagtaacaagctcacgcagttgggcacttttgaagatcattttctcagcctccagaggatgttcaataactgtgaggtggtccttgggaatttggaaattacctatgtgcagaggaattatgatctttccttcttaaagaccatccaggaggtggctggttatgtcctcattgccctcaacacagtggagcgaattcctttggaaaacctgcagatcatcagaggaaatatgtactacgaaaattcctatgccttagcagtcttatctaactatgatgcaaataaaaccggactgaaggagctgcccatgagaaatttacaggaaatcctgcatggcgccgtgcggttcagcaacaaccctgccctgtgcaacgtggagagcatccagtggcgggacatagtcagcagtgactttctcagcaacatgtcgatggacttccagaaccacctgggcagctgccaaaagtgtgatccaagctgtcccaatgggagctgctggggtgcaggagaggagaactgccagaaactgaccaaaatcatctgtgcccagcagtgctccgggcgctgccgtggcaagtcccccagtgactgctgccacaaccagtgtgctgcaggctgcacaggcccccgggagagcgactgcctggtctgccgcaaattccgagacgaagccacgtgcaaggacacctgccccccactcatgctctacaaccccaccacgtaccagatggatgtgaaccccgagggcaaatacagctttggtgccacctgcgtgaagaagtgtccccgtaattatgtggtgacagatcacggctcgtgcgtccgagcctgtggggccgacagctatgagatggaggaagacggcgtccgcaagtgtaagaagtgcgaagggccttgccgcaaagtgtgtaacggaataggtattggtgaatttaaagactcactctccataaatgctacgaatattaaacacttcaaaaactgcacctccatcagtggcgatctccacatcctgccggtggcatttaggggtgactccttcacacatactcctcctctggatccacaggaactggatattctgaaaaccgtaaaggaaatcacaggtttgagctgaattatcacatgaatataaatgggaaatcagtgttttagagagagaacttttcgacatatttcctgttcccttggaataaaaacatttcttctgaaattttaccgttaaaaaaaaaaaaaaaaaaaaaaaaa

SEQ ID NO: 154 - protein, 405 aa, Homo sapiens
MRPSGTAGAALLALLAALCPASRALEEKKVCQGTSNKLTQLGTFEDHFLSLQRMFNNCEVVLGNLEITYVQRNYDLSFLKTIQEVAGYVLIALNTVERIPLENLQIIRGNMYYENSYALAVLSNYDANKTGLKELPMRNLQEILHGAVRFSNNPALCNVESIQWRDIVSSDFLSNMSMDFQNHLGSCQKCDPSCPNGSCWGAGEENCQKLTKIICAQQCSGRCRGKSPSDCCHNQCAAGCTGPRESDCLVCRKFRDEATCKDTCPPLMLYNPTTYQMDVNPEGKYSFGATCVKKCPRNYVVTDHGSCVRACGADSYEMEEDGVRKCKKCEGPCRKVCNGIGIGEFKDSLSINATNIKHFKNCTSISGDLHILPVAFRGDSFTHTPPLDPQELDILKTVKEITGLS

SEQ ID NO: 155 - DNA, 2865 bp, Homo sapiens
  mRNA (1)..(2865): epidermal growth factor receptor (erythroblastic leukemia viral (v-erb-b) oncogene homolog, avian) (EGFR), transcript variant 1 (isoform d)
  CDS (247)..(2364)
ccccggcgcagcgcggccgcagcagcctccgccccccgcacggtgtgagcgcccgacgcggccgaggcggccggagtcccgagctagccccggcggccgccgccgcccagaccggacgacaggccacctcgtcggcgtccgcccgagtccccgcctcgccgccaacgccacaaccaccgcgcacggccccctgactccgtccagtattgatcgggagagccggagcgagctcttcggggagcagcgatgcgaccctccgggacggccggggcagcgctcctggcgctgctggctgcgctctgcccggcgagtcgggctctggaggaaaagaaagtttgccaaggcacgagtaacaagctcacgcagttgggcacttttgaagatcattttctcagcctccagaggatgttcaataactgtgaggtggtccttgggaatttggaaattacctatgtgcagaggaattatgatctttccttcttaaagaccatccaggaggtggctggttatgtcctcattgccctcaacacagtggagcgaattcctttggaaaacctgcagatcatcagaggaaatatgtactacgaaaattcctatgccttagcagtcttatctaactatgatgcaaataaaaccggactgaaggagctgcccatgagaaatttacaggaaatcctgcatggcgccgtgcggttcagcaacaaccctgccctgtgcaacgtggagagcatccagtggcgggacatagtcagcagtgactttctcagcaacatgtcgatggacttccagaaccacctgggcagctgccaaaagtgtgatccaagctgtcccaatgggagctgctggggtgcaggagaggagaactgccagaaactgaccaaaatcatctgtgcccagcagtgctccgggcgctgccgtggcaagtcccccagtgactgctgccacaaccagtgtgctgcaggctgcacaggcccccgggagagcgactgcctggtctgccgcaaattccgagacgaagccacgtgcaaggacacctgccccccactcatgctctacaaccccaccacgtaccagatggatgtgaaccccgagggcaaatacagctttggtgccacctgcgtgaagaagtgtccccgtaattatgtggtgacagatcacggctcgtgcgtccgagcctgtggggccgacagctatgagatggaggaagacggcgtccgcaagtgtaagaagtgcgaagggccttgccgcaaagtgtgtaacggaataggtattggtgaatttaaagactcactctccataaatgctacgaatattaaacacttcaaaaactgcacctccatcagtggcgatctccacatcctgccggtggcatttaggggtgactccttcacacatactcctcctctggatccacaggaactggatattctgaaaaccgtaaaggaaatcacagggtttttgctgattcaggcttggcctgaaaacaggacggacctccatgcctttgagaacctagaaatcatacgcggcaggaccaagcaacatggtcagttttctcttgcagtcgtcagcctgaacataacatccttgggattacgctccctcaaggagataagtgatggagatgtgataatttcaggaaacaaaaatttgtgctatgcaaatacaataaactggaaaaaactgtttgggacctccggtcagaaaaccaaaattataagcaacagaggtgaaaacagctgcaaggccacaggccaggtctgccatgccttgtgctcccccgagggctgctggggcccggagcccagggactgcgtctcttgccggaatgtcagccgaggcagggaatgcgtggacaagtgcaaccttctggagggtgagccaagggagtttgtggagaactctgagtgcatacagtgccacccagagtgcctgcctcaggccatgaacatcacctgcacaggacggggaccagacaactgtatccagtgtgcccactacattgacggcccccactgcgtcaagacctgcccggcaggagtcatgggagaaaacaacaccctggtctggaagtacgcagacgccggccatgtgtgccacctgtgccatccaaactgcacctacgggccaggaaatgagagtctcaaagccatgttattctgcctttttaaactatcatcctgtaatcaaagtaatgatggcagcgtgtcccaccagagcgggagcccagctgctcaggagtcatgcttaggatggatcccttctcttctgccgtcagagtttcagctgggttggggtggatgcagccacctccatgcctggccttctgcatctgtgatcatcacggcctcctcctgccactgagcctcatgccttcacgtgtctgttccccccgcttttcctttctgccacccctgcacgtgggccgccaggttcccaagagtatcctacccatttccttccttccactccctttgccagtgcctctcaccccaactagtagctaaccatcacccccaggactgacctcttcctcctcgctgccagatgattgttcaaagcacagaatttgtcagaaacctgcagggactccatgctgccagccttctccgtaattagcatggccccagtccatgcttctagccttggttccttctgcccctctgtttgaaattctagagccagctgtgggacaattatctgtgtcaaaagccagatgtgaaaacatctcaataacaaactggctgctttgttcaatgctagaacaacgcctgtcacagagtagaaactcaaaaatatttgctgagtgaatgaacaaatgaataaatgcataataaataattaaccaccaatccaacatccaga

SEQ ID NO: 156 - protein, 705 aa, Homo sapiens
MRPSGTAGAALLALLAALCPASRALEEKKVCQGTSNKLTQLGTFEDHFLSLQRMFNNCEVVLGNLEITYVQRNYDLSFLKTIQEVAGYVLIALNTVERIPLENLQIIRGNMYYENSYALAVLSNYDANKTGLKELPMRNLQEILHGAVRFSNNPALCNVESIQWRDIVSSDFLSNMSMDFQNHLGSCQKCDPSCPNGSCWGAGEENCQKLTKIICAQQCSGRCRGKSPSDCCHNQCAAGCTGPRESDCLVCRKFRDEATCKDTCPPLMLYNPTTYQMDVNPEGKYSFGATCVKKCPRNYVVTDHGSCVRACGADSYEMEEDGVRKCKKCEGPCRKVCNGIGIGEFKDSLSINATNIKHFKNCTSISGDLHILPVAFRGDSFTHTPPLDPQELDILKTVKEITGFLLIQAWPENRTDLHAFENLEIIRGRTKQHGQFSLAVVSLNITSLGLRSLKEISDGDVIISGNKNLCYANTINWKKLFGTSGQKTKIISNRGENSCKATGQVCHALCSPEGCWGPEPRDCVSCRNVSRGRECVDKCNLLEGEPREFVENSECIQCHPECLPQAMNITCTGRGPDNCIQCAHYIDGPHCVKTCPAGVMGENNTLVWKYADAGHVCHLCHPNCTYGPGNESLKAMLFCLFKLSSCNQSNDGSVSHQSGSPAAQESCLGWIPSLLPSEFQLGWGGCSHLHAWPSASVIITASSCH

SEQ ID NO: 157 - DNA, 5436 bp, Homo sapiens
  mRNA (1)..(5436): v-Ki-ras2 Kirsten rat sarcoma viral oncogene homolog (KRAS), transcript variant a (isoform a)
  CDS (182)..(751)
ggccgcggcggcggaggcagcagcggcggcggcagtggcggcggcgaaggtggcggcggctcggccagtactcccggcccccgccatttcggactgggagcgagcgcggcgcaggcactgaaggcggcggcggggccagaggctcagcggctcccaggtgcgggagagaggcctgctgaaaatgactgaatataaacttgtggtagttggagctggtggcgtaggcaagagtgccttgacgatacagctaattcagaatcattttgtggacgaatatgatccaacaatagaggattcctacaggaagcaagtagtaattgatggagaaacctgtctcttggatattctcgacacagcaggtcaagaggagtacagtgcaatgagggaccagtacatgaggactggggagggctttctttgtgtatttgccataaataatactaaatcatttgaagatattcaccattatagagaacaaattaaaagagttaaggactctgaagatgtacctatggtcctagtaggaaataaatgtgatttgccttctagaacagtagacacaaaacaggctcaggacttagcaagaagttatggaattccttttattgaaacatcagcaaagacaagacagagagtggaggatgctttttatacattggtgagggagatccgacaatacagattgaaaaaaatcagcaaagaagaaaagactcctggctgtgtgaaaattaaaaaatgcattataatgtaatctgggtgttgatgatgccttctatacattagttcgagaaattcgaaaacataaagaaaagatgagcaaagatggtaaaaagaagaaaaagaagtcaaagacaaagtgtgtaattatgtaaatacaatttgtacttttttcttaaggcatactagtacaagtggtaatttttgtacattacactaaattattagcatttgttttagcattacctaatttttttcctgctccatgcagactgttagcttttaccttaaatgcttattttaaaatgacagtggaagtttttttttcctctaagtgccagtattcccagagttttggtttttgaactagcaatgcctgtgaaaaagaaactgaatacctaagatttctgtcttggggtttttggtgcatgcagttgattacttcttatttttcttaccaattgtgaatgttggtgtgaaacaaattaatgaagcttttgaatcatccctattctgtgttttatctagtcacataaatggattaattactaatttcagttgagaccttctaattggtttttactgaaacattgagggaacacaaatttatgggcttcctgatgatgattcttctaggcatcatgtcctatagtttgtcatccctgatgaatgtaaagttacactgttcacaaaggttttgtctcctttccactgctattagtcatggtcactctccccaaaatattatattttttctataaaaagaaaaaaatggaaaaaaattacaaggcaatggaaactattataaggccatttccttttcacattagataaattactataaagactcctaatagcttttcctgttaaggcagacccagtatgaaatggggattattatagcaaccattttggggctatatttacatgctactaaatttttataataattgaaaagattttaacaagtataaaaaattctcataggaattaaatgtagtctccctgtgtcagactgctctttcatagtataactttaaatcttttcttcaacttgagtctttgaagatagttttaattctgcttgtgacattaaaagattatttgggccagttatagcttattaggtgttgaagagaccaaggttgcaaggccaggccctgtgtgaacctttgagctttcatagagagtttcacagcatggactgtgtccccacggtcatccagtgttgtcatgcattggttagtcaaaatggggagggactagggcagtttggatagctcaacaagatacaatctcactctgtggtggtcctgctgacaaatcaagagcattgcttttgtttcttaagaaaacaaactcttttttaaaaattacttttaaatattaactcaaaagttgagattttggggtggtggtgtgccaagacattaattttttttttaaacaatgaagtgaaaaagttttacaatctctaggtttggctagttctcttaacactggttaaattaacattgcataaacacttttcaagtctgatccatatttaataatgctttaaaataaaaataaaaacaatccttttgataaatttaaaatgttacttattttaaaataaatgaagtgagatggcatggtgaggtgaaagtatcactggactaggaagaaggtgacttaggttctagataggtgtcttttaggactctgattttgaggacatcacttactatccatttcttcatgttaaaagaagtcatctcaaactcttagttttttttttttacaactatgtaatttatattccatttacataaggatacacttatttgtcaagctcagcacaatctgtaaatttttaacctatgttacaccatcttcagtgccagtcttgggcaaaattgtgcaagaggtgaagtttatatttgaatatccattctcgttttaggactcttcttccatattagtgtcatcttgcctccctaccttccacatgccccatgacttgatgcagttttaatacttgtaattcccctaaccataagatttactgctgctgtggatatctccatgaagttttcccactgagtcacatcagaaatgccctacatcttatttcctcagggctcaagagaatctgacagataccataaagggatttgacctaatcactaattttcaggtggtggctgatgctttgaacatctctttgctgcccaatccattagcgacagtaggatttttcaaacctggtatgaatagacagaaccctatccagtggaaggagaatttaataaagatagtgctgaaagaattccttaggtaatctataactaggactactcctggtaacagtaatacattccattgttttagtaaccagaaatcttcatgcaatgaaaaatactttaattcatgaagcttactttttttttttggtgtcagagtctcgctcttgtcacccaggctggaatgcagtggcgccatctcagctcactgcaacctccatctcccaggttcaagcgattctcgtgcctcggcctcctgagtagctgggattacaggcgtgtgccactacactcaactaatttttgtatttttaggagagacggggtttcaccctgttggccaggctggtctcgaactcctgacctcaagtgattcacccaccttggcctcataaacctgttttgcagaactcatttattcagcaaatatttattgagtgcctaccagatgccagtcaccgcacaaggcactgggtatatggtatccccaaacaagagacataatcccggtccttaggtagtgctagtgtggtctgtaatatcttactaaggcctttggtatacgacccagagataacacgatgcgtattttagttttgcaaagaaggggtttggtctctgtgccagctctataattgttttgctacgattccactgaaactcttcgatcaagctactttatgtaaatcacttcattgttttaaaggaataaacttgattatattgtttttttatttggcataactgtgattcttttaggacaattactgtacacattaaggtgtatgtcagatattcatattgacccaaatgtgtaatattccagttttctctgcataagtaattaaaatatacttaaaaattaatagttttatctgggtacaaataaacaggtgcctgaactagttcacagacaaggaaacttctatgtaaaaatcactatgatttctgaattgctatgtgaaactacagatctttggaacactgtttaggtagggtgttaagacttacacagtacctcgtttctacacagagaaagaaatggccatacttcaggaactgcagtgcttatgaggggatatttaggcctcttgaatttttgatgtagatgggcatttttttaaggtagtggttaattacctttatgtgaactttgaatggtttaacaaaagatttgtttttgtagagattttaaagggggagaattctagaaataaatgttacctaattattacagccttaaagacaaaaatccttgttgaagtttttttaaaaaaagctaaattacatagacttaggcattaacatgtttgtggaagaatatagcagacgtatattgtatcatttgagtgaatgttcccaagtaggcattctaggctctatttaactgagtcacactgcataggaatttagaacctaacttttataggttatcaaaactgttgtcaccattgcacaattttgtcctaatatatacatagaaactttgtggggcatgttaagttacagtttgcacaagttcatctcatttgtattccattgattttttttttcttctaaacattttttcttcaaacagtatataactttttttaggggatttttttttagacagcaaaaactatctgaagatttccatttgtcaaaaagtaatgatttcttgataattgtgtagtaatgttttttagaacccagcagttaccttaaagctgaatttatatttagtaacttctgtgttaatactggatagcatgaattctgcattgagaaactgaatagctgtcataaaatgaaactttctttctaaagaaagatactcacatgagttcttgaagaatagtcataactagattaagatctgtgttttagtttaatagtttgaagtgcctgtttgggataatgataggtaatttagatgaatttaggggaaaaaaaagttatctgcagatatgttgagggcccatctctccccccacacccccacagagctaactgggttacagtgttttatccgaaagtttccaattccactgtcttgtgttttcatgttgaaaatacttttgcatttttcctttgagtgccaatttcttactagtactatttcttaatgtaacatgtttacctggaatgtattttaactatttttgtatagtgtaaactgaaacatgcacattttgtacattgtgctttcttttgtgggacatatgcagtgtgatccagttgttttccatcatttggttgcgctgacctaggaatgttggtcatatcaaacattaaaaatgaccactcttttaattgaaattaacttttaaatgtttataggagtatgtgctgtgaagtgatctaaaatttgtaatatttttgtcatgaactgtactactcctaattattgtaatgtaataaaaatagttacagtgacaaaaaaaaaaaaaaa

SEQ ID NO: 158 - protein, 189 aa, Homo sapiens [sequence omitted]
